United States Patent Application Publication US 2022/0282241 A1 - sequence listing, part 3

SEQ ID NO: 2 - DNA, 3981202 bp, Artificial Sequence (residues 1-1,990,601 of 3,981,202)
  Synthetic E. coli genome
agcttttcattctgactgcaacgggcaatatgtctctgtgtggattaaaaaaagagtgtctgatagcagcttctgaactggttacctgccgtgagtaaattaaaattttattgacttaggtcactaaatactttaaccaatataggcatagcgcacagacagataaaaattacagagtacacaacatccatgaaacgcattagcaccaccattaccaccaccatcaccattaccacaggtaacggtgcgggctgacgcgtacaggaaacacagaaaaaagcccgcacctgacagtgcgggctttttttttcgaccaaaggtaacgaggtaacaaccatgcgagtgttgaagttcggcggtacaagtgtggcaaatgcagaacgttttctgcgtgttgccgatattctggaaagcaatgccaggcaggggcaggtggccaccgtcctctctgcccccgccaaaatcaccaaccacctggtggcgatgattgaaaaaaccattagcggccaggatgctttacccaatatcagcgatgccgaacgtatttttgccgaacttttgacgggactcgccgccgcccagccggggttcccgctggcgcaattgaaaactttcgtcgatcaggaatttgcccaaataaaacatgtcctgcatggcattagtttgttggggcagtgcccggatagcatcaacgctgcgctgatttgccgtggcgagaaaatgagcatcgccattatggccggcgtattagaagcgcgcggtcacaacgttactgttatcgatccggtcgaaaaactgctggcagtggggcattacctcgaatctaccgtcgatattgctgagtccacccgccgtattgcggcaagccgcattccggctgatcacatggtgctgatggcaggtttcaccgccggtaatgaaaaaggcgaactggtggtgcttggacgcaacggttccgactactctgctgcggtgctggctgcctgtttacgcgccgattgttgcgagatttggacggacgttgacggggtctatacctgcgacccgcgtcaggtgcccgatgcgaggttgttgaagagcatgtcctaccaggaagcgatggagctttcctacttcggcgctaaagttcttcacccccgcaccattacccccatcgcccagttccagatcccttgcctgattaaaaataccggaaatcctcaagcaccaggtacgctcattggtgccagccgtgatgaagacgaattaccggtcaagggcatttccaatctgaataacatggcaatgttcagcgtttctggtccggggatgaaagggatggtcggcatggcggcgcgcgtctttgcagcgatgagtcgcgcccgtatttccgtggtgctgattacgcaaagttcttccgaatacagcatcagtttctgcgttccacaaagcgactgtgtgcgagctgaacgggcaatgcaggaagagttctacctggaactgaaagaaggcttactggagccgctggcagtgacggaacggctggccattatcagcgtggtaggtgatggtatgcgcaccttgcgtgggatcagcgcgaaattctttgccgcactggcccgcgccaatatcaacattgtcgccattgctcagggatcttctgaacgcagtatctctgtcgtggtaaataacgatgatgcgaccactggcgtgcgcgttactcatcagatgctgttcaataccgatcaggttatcgaagtgtttgtgattggcgtcggtggcgttggcggtgcgctgctggagcaactgaagcgtcagcaaagctggctgaagaataaacatatcgacttacgtgtctgcggtgttgccaacagcaaggctctgctcaccaatgtacatggccttaatctggaaaactggcaggaagaactggcgcaagccaaagagccgtttaatctcgggcgcttaattcgcctcgtgaaagaatatcatctgctgaacccggtcattgttgactgcacttccagccaggcagtggcggatcaatatgccgacttcctgcgcgaaggtttccacgttgtcacgccgaacaaaaaggccaacaccagcagcatggattactaccatcagttgcgttatgcggcggaaaaaagccggcgtaaattcctctatgacaccaacgttggggctggattaccggttattgagaacctgcaaaatctgctcaatgcaggtgatgaattgatgaagttctccggcattctttctggtagcctttcttatatcttcggcaagttagacgaaggcatgagtttctccgaggcgaccacgctggcgcgggaaatgggttataccgaaccggacccgcgagatgatctttctggtatggatgtggcgcgtaaactattgattctcgctcgtgaaacgggacgtgaactggagctggcggatattgaaattgaacctgtgctgcccgcagagtttaacgccgagggtgatgttgccgcttttatggcgaatctgagtcaactcgacgatctctttgccgcgcgcgtggcgaaggcccgtgatgaaggaaaagttttgcgctatgttggcaatattgatgaagatggcgtctgccgcgtgaagattgccgaagtggatggtaatgatccgctgttcaaagtgaaaaatggcgaaaacgccctggccttctatagccactattatcagccgctgccgttggtactgcgcggatatggtgcgggcaatgacgttacagctgccggtgtctttgctgatctgctacgtaccctcagttggaagttaggagtctgacatggttaaagtttatgccccggcttccagtgccaatatgagcgtcgggtttgatgtgctcggggcggcggtgacacctgttgatggtgcattgctcggagatgtagtcacggttgaggcggcagagacattcagtctcaacaacctcggacgctttgccgataagctgccgagtgaaccacgggaaaatatcgtttatcagtgctgggagcgtttttgccaggaactgggtaagcaaattccagtggcgatgaccctggaaaagaatatgccgatcggtagcggcttaggctccagtgcctgtagcgtggtcgcggcgctgatggcgatgaatgaacactgcggcaagccgcttaatgacactcgtttgctggctttgatgggcgagctggaaggccgtatctccggcagcattcattacgacaacgtggcaccgtgttttctcggtggtatgcagttgatgatcgaagaaaacgacatcatcagccagcaagtgccagggtttgatgagtggctgtgggtgctggcgtatccggggattaaagtcagcacggcagaagccagggctattttaccggcgcagtatcgccgccaggattgcattgcgcacgggcgacatctggcaggcttcattcacgcctgctattcccgtcagcctgagcttgccgcgaagctgatgaaagatgttatcgctgaaccctaccgtgaacggttactgccaggcttccggcaggcgcggcaggcggtcgcggaaatcggcgcggtagcgagcggtatctccggctccggcccgaccttgttcgctctgtgtgacaagccggaaaccgcccagcgcgttgccgactggttgggtaagaactacctgcaaaatcaggaaggttttgttcatatttgccggctggatacggcgggcgcacgagtactggaaaactaaatgaaactctacaatctgaaagatcacaacgagcaggtcagctttgcgcaagccgtaacccaggggttgggcaaaaatcaggggctgttttttccgcacgacctgccggaattcagcctgactgaaattgatgagatgctgaagctggattttgtcacccgcagtgcgaagatcctcagcgcgtttattggtgatgaaatcccacaggaaatcctggaagagcgcgtgcgcgcggcgtttgccttcccggctccggtcgccaatgttgaaagcgatgtcggttgtctggaattgttccacgggccaacgctggcatttaaagatttcggcggtcgctttatggcacaaatgctgacccatattgcgggtgataagccagtgaccattctgaccgcgacctccggtgataccggagcggcagtggctcatgctttctacggtttaccgaatgtgaaagtggttatcctctatccacgaggcaaaatcagtccactgcaagaaaaactgttctgtacattgggcggcaatatcgaaactgttgccatcgacggcgatttcgatgcctgtcaggcgctggtgaagcaggcgtttgatgatgaagaactgaaagtggcgctagggttaaacagcgctaacagcattaacatcagccgtttgctggcgcagatttgctactactttgaagctgttgcgcagctgccgcaggagacgcgcaaccagctggttgtcagcgtgccaagcggaaacttcggcgatttgacggcgggtctgctggcgaagagtctcggtctgccggtgaaacgttttattgctgcgaccaacgtgaacgataccgtgccacgtttcctgcacgacggtcagtggagtcccaaagcgactcaggcgacgttatccaacgcgatggacgtgagtcagccgaacaactggccgcgtgtggaagagttgttccgccgcaaaatctggcaactgaaagagctgggttatgcagccgtggatgatgaaaccacgcaacagacaatgcgtgagttaaaagaactgggctacactagcgagccgcacgctgccgtagcttatcgtgcgctgcgtgatcagttgaatccaggcgaatatggcttgttcctcggcaccgcgcatccggcgaaatttaaagagagcgtggaagcgattctcggtgaaacgttggatctgccaaaagagctggcagaacgtgctgatttacccttgcttagtcataatctgcccgccgattttgctgcgttgcgtaaattgatgatgaatcatcagtaaaatctattcattatctcaatcaggccgggtttgcttttatgcagcccggcttttttatgaagaaattatggagaaaaatgacagggaaaaaggagaaattctcaataaatgcggtaacttagagattaggattgcggagaataacaaccgccgttctcatcgagtaatctccggatatcgacccataacgggcaatgataaaaggagtaacctgtgaaaaagatgcaatctatcgtactcgcactttccctggttctggtcgctcccatggcagcacaggctgcggaaattacgttagtcccgagtgtaaaattacagataggcgatcgtgataatcgtggctattactgggatggaggtcactggcgcgaccacggctggtggaaacaacattatgaatggcgaggcaatcgctggcacctacacggaccgccgccaccgccgcgccaccataagaaagctcctcatgatcatcacggcggtcatggtccaggcaaacatcaccgctaaatgacaaatgccgggtaacaatccggcattcagcgcctgatgcgacgctggcgcgtcttatcaggcctacgttaattctgcaatatattgaatctgcatgcttttgtaggcaggataaggcgttcacgccgcatccggcattgactgcaaacttaacgctgctcgtagcgtttaaacaccagttcgccattgctggaggaatcttcatcaaagaagtaaccttcgctattaaaaccagtcagttgctctggtttggtcagccgattttcaataatgaaacgactcatcagaccgcgtgctttcttagcgtagaagctgatgatcttaaatttgccgttcttctcatcgaggaacaccggcttgataatctcggcattcaatttcttcggcttcacgcttttaaaatactcatcactcgccagattaatcaccacattatcgccttgtgctgcgagcgcctcgttcagcttgttggtgatgatatctccccagaattgatacagatctttccctcgggcattctcaagacggatccccatttccagacgataaggctgcattaaatcgagcgggcggagtacgccatacaagccggaaagcattcgcaaatgctgttgggcaaaatcgaaatcgtcttcgctgaaggtttcggcctgcaagccggtgtagacatcacctttaaacgccagaatcgcctggcgggcattcgccggcgtgaaatctggctgccagtcatgaaagcgagcggcgttgatacccgccagtttgtcgctgatgcgcatcagcgtgctaatctgcggaggcgtcagtttccgcgcctcatggatcaactgctgggaattgtctaacagctccggcagcgtatagcgcgtggtggtcaacgggctttggtaatcaagcgttttcgcaggactaataagaatcagcatatccagtccttgcaggaaatttatgccgactttagcaaaaaatgagaatgagttgatcgatagttgtgattactcctggctaacatcatcccacgcgtccggagaaagctggcgaccgatatccggataacgcaatggatcaaacaccgggcgcacgccgagtttacgctggcgtagataatcactggcaatggtatgaaccacagggctgagcagtaaaatggcggtcaaattggtaatagccatgcaggccattatgatatctgccagttgccacatcagcggaaggcttagcaaggtgccgccgatgaccgttgcgaaggtgcagatccgcaaacaccagatcgctttagggttgttcaggcgtaaaaagaagagattgttttcggcataaatgtagttggcaacgatggagctgaaggcaaacagaataaccacaagggtaacaaactcagcaccccaggaacccattagcacccgcatcgccttctggataagctgaataccttccagcggcatgtaggttgtgccgttacccgccagtaatatcagcatggcgcttgccgtacagatgaccagggtgtcgataaaaatgccaatcatctggacaatcccttgcgctgccggatgcggaggccaggacgccgctgccgctgccgcgtttggcgtgctacccattcccgcctcattggaaaacatactgcgctgaaaaccgttagtaatcgcctggcttaaggtatatcccgccgcgccgcctgccgcttcctgccagccaaaagcactctcaaaaatagaccaaatgacgtggggaagttgcccgatattcattacgcaaattaccaggctggtcagtacccagattatcgccatcaacgggacaaagccctgcatgagccgggcgacgccatgaagaccgcgagtgattgccagcagagtaaagacagcgagaataatgcctgtcaccagcgggggaaaatcaaaagaaaaactcagggcgcgggcaacggcgttcgcttgaactccgctgaaaattatgccataggcgatgagcaaaaagacggcgaacagaacgcccatccagcgcatccccagcccgcgcgccatataccatgccggtccgccacgaaactgcccattgacgtcacgttctttataaagttgtgccagagaacattcggcaaagctggtcgccatgccgataaacgcggcaacccacatccaaaagacggctccaggtccaccggcggtaatagccagcgcaacgccggccaggttgccgctacccacgcgcgccgcaagactggtacacaaactctgaaaactggttaaaccgcctggctgtggatgaatgctatttttaagacttttgccaaactggcggatgtagcgaaactgcacaaatccggtgcgaaaagtgaaccaacaacctgcgccgaagagcaggtaaatcattacgcttccccaaaggacgctgttaatgaaggagaaaaaatctggcatgcatatccctcttattgccggtcgcgatgactttcctgtgtaaacgttaccaattgtttaagaagtatatacgctacgaggtacttgataacttctgcgtagcatacatgaggttttgtataaaaatggcgggcgatatcaacgcagtgtcagaaatccgaaacagtctcgcctggcgataaccgtcttgtcggcggttgcgctgacgttgcgtcgtgatatcatcagggcagaccggttacatccccctaacaagctgtttaaagagaaatactatcatgacggacaaattgacctcccttcgtcagtacaccaccgtagtggccgacactggggacatcgcggcaatgaagctgtatcaaccgcaggatgccacaaccaacccttctctcattcttaacgcagcgcagattccggaataccgtaagttgattgatgatgctgtcgcctgggcgaaacagcagagcaacgatcgcgcgcagcagatcgtggacgcgaccgacaaactggcagtaaatattggtctggaaatcctgaaactggttccgggccgtatcagtactgaagttgatgcgcgtctttcctatgacaccgaagcgagtattgcgaaagcaaaacgcctgatcaaactctacaacgatgctggtattagcaacgatcgtattctgatcaaactggcttctacctggcagggtatccgtgctgcagaacagctggaaaaagaaggcatcaactgtaacctgaccctgctgttctccttcgctcaggctcgtgcttgtgcggaagcgggcgtgttcctgatcagcccgtttgttggccgtattcttgactggtacaaagcgaataccgataagaaagagtacgctccggcagaagatccgggcgtggtttctgtatctgaaatctaccagtactacaaagagcacggttatgaaaccgtggttatgggcgcaagcttccgtaacatcggcgaaattctggaactggcaggctgcgaccgtctgaccatcgcaccggcactgctgaaagagctggcggagagcgaaggggctatcgaacgtaaactgtcttacaccggcgaagtgaaagcgcgtccggcgcgtatcactgagtccgagttcctgtggcagcacaaccaggatccaatggcagtagataaactggcggaaggtatccgtaagtttgctattgaccaggaaaaactggaaaaaatgatcggcgatctgctgtaatcattcttagcgtgaccgggaagtcggtcacgctacctcttctgaagcctgtctgtcactcccttcgcagtgtatcattctgtttaacgagactgtttaaacggaaaaatcttgatgaatactttacgtattggcttagtttccatctctgatcgcgcatccagcggcgtttatcaggataaaggcatccctgcgctggaagaatggctgacaagcgcgctaaccacgccgtttgaactggaaacccgcttaatccccgatgagcaggcgatcatcgagcaaacgttgtgtgagctggtggatgaaatgagttgccatctggtgctcaccacgggcggaactggcccggcgcgtcgtgacgtaacgcccgatgcgacgctggcagtagcggaccgcgagatgcctggctttggtgaacagatgcgccagatcagcctgcattttgtaccaactgcgatccttagccgtcaggtgggcgtgattcgcaaacaggcgctgatccttaacttacccggtcagccgaagtctattaaagagacgctggaaggtgtgaaggacgctgagggtaacgttgtggtacacggtatttttgccagcgtaccgtactgcattcagttgctggaagggccatacgttgaaacggcaccggaagtggttgcagcattcagaccgaagagtgcaagacgcgacgttagcgaataaaaaaatccccccgagcggggggatctcaaaacaattagtgggattcaccaatcggcagaacggtgcgaccaaactgctcgttcagtacttcacccatcgccagatagattgcgctggcaccgcagatcagcccaatccagccggcaaagtggatgattgcggcgttaccggcaatgttaccgatcgccagcagggcaaacagcacggtcaggctaaagaaaacgaattgcagaacgcgtgcgcctttcagcgtgccgaagaacataaacagcgtaaatacgccccacagacccaggtagacaccaaggaactgtgcatttggcgcatcggtcagacccagtttcggcatcagcagaatcgcaaccagcgtcagccagaaagaaccgtaagaggtgaatgcggttaaaccgaaagtgttgccttttttgtactccagcagaccagcaaaaatttgcgcgatgccgccgtagaaaatgcccatggcaagaataataccgtccagagcgaaataacccacgttgtgcaggttaagcagaatggtggtcatgccgaagcccatcaggcccagcggtgccggattagccaacttagtgttgcccataattcctcaaaaatcatcatcgaatgaatggtgaaataatttccctgaataactgtagtgttttcagggcgcggcataataatcagccagtggggcagtgtctacgatcttttgaggggaaaatgaaaattttccccggtttccggtatcagacctgagtggcgctaaccatccggcgcaggcaggcgatttgcagtacggctggaatcgtcacgcgataggcgctgccgctgaccgctttaaccccatttagtgccgcacctacagggcctcccagccccgcgccgcgcagcaaaccatgcccaagtacgctcattgctgcgtgggtgcgtaaaatgcgggtcagttggctggaaagcaaatggctcacaccttttgccaataatttgtctttcatcagcagcggcagcagctcttccagctcattcaccctggcatcgaccgcgtgcagaaactcctgcttatgttcctcgtccattttcttccaggtattacgcagaaattgttccagtaactgttgctcaatttcaaacgtagacatctctttgtcggctttcagcttcaatcgcttactaacatcgagcaaaatggcccgatacaatttaccgtgtccgcgcagtttgttggcgatactatcgccaccaaaatgctgtaattctccggcaatcagctgccagttgcggcgatgttgctcgggatgcccttccatgcttttaaacagttcgttgcgcatcagtacgctggagaggcgagttttgcctttttcattatgggtgagcaatcgggcgaaatttgccaactgttcctcactacaatgctgaagaaaatccagatcactatcattcaggtaattaacattcattttttgtggcttctatattctggcgttagtcgtcgccgataattttcagcgtggccatatcgctactgttcaccgtatgaccgctaaaggtgattttactgacgcagcgtttattgtcgttatcgctgttaatgttgatccagtcagtggtttgcccttcttttatttcactaggaatattcaggctctgactggcgctacgggcggctttgaaataaacgcttgcaccgcttaactgtaaatcgccatggtcggcagagagttgtatgcgtttcacaatgcgacaaacaggaagtttcagcgccagatcgttggtttcgttacgcggcattgcaatggcgccgaggagtttatggtcgtttgcctgcgccgtgcagcacagcatcaggctaatcgccaggctggcggaaatcgtaaaaacggatttcataaggattctcttagtgggaagaggtagggggatgaatacccactagtttactgctgataaagagaagattcaggcacgtaatcttttctttttattacaattttttgatgaatgccttggctgcgattcattctttatatgaataaaattgctgtcaattttacgtcttgtcctgccatatcgcgaaatttctgcgcaaaagcacaaaaaatttttgcatctcccccttgatgacgtggtttacgaccccatttagtagtcaaccgcagtgagtgagtctgcaaaaaaatgaaattgggcagttgaaaccagacgtttcgcccctattacagactcacaaccacatgatgaccgaatatatagtggagacgtttagatgggtaaaataattggtatcgacctgggtactaccaactcttgtgtagcgattatggatggcaccactcctcgcgtgctggagaacgccgaaggcgatcgcaccacgccttctatcattgcctatacccaggatggtgaaactctagttggtcagccggctaaacgtcaggcagtgacgaacccgcaaaacactctgtttgcgattaaacgcctgattggtcgccgcttccaggacgaagaagtacagcgtgatgtttccatcatgccgttcaaaattattgctgctgataacggcgacgcatgggtcgaagttaaaggccagaaaatggcaccgccgcagatttctgctgaagtgctgaaaaaaatgaagaaaaccgctgaagattacctgggtgaaccggtaactgaagctgttatcaccgtaccggcatactttaacgatgctcagcgtcaggcaaccaaagacgcaggccgtatcgctggtctggaagtaaaacgtatcatcaacgaaccgaccgcagctgcgctggcttacggtctggacaaaggcactggcaaccgtactatcgcggtttatgacctgggtggtggtactttcgatatttctattatcgaaatcgacgaagttgacggcgaaaaaaccttcgaagttctggcaaccaacggtgatacccacctggggggtgaagacttcgacagccgtctgatcaactatctggttgaagaattcaagaaagatcagggcattgacctgcgcaacgatccgctggcaatgcagcgcctgaaagaagcggcagaaaaagcgaaaatcgaactgtcttccgctcagcagaccgacgttaacctgccatacatcactgcagacgcgaccggtccgaaacacatgaacatcaaagtgactcgtgcgaaactggaaagcctggttgaagatctggtaaaccgttccattgagccgctgaaagttgcactgcaggacgctggcctgtccgtatctgatatcgacgacgttatcctcgttggtggtcagactcgtatgccaatggttcagaagaaagttgctgagttctttggtaaagagccgcgtaaagacgttaacccggacgaagctgtagcaatcggtgctgctgttcagggtggtgttctgactggtgacgtaaaagacgtactgctgctggacgttaccccgctgtctctgggtatcgaaaccatgggcggtgtgatgacgacgctgatcgcgaaaaacaccactatcccgaccaagcacagccaggtgttctctaccgctgaagacaaccagtctgcggtaaccatccatgtgctgcagggtgaacgtaaacgtgcggctgataacaaatctctgggtcagttcaacctagatggtatcaacccggcaccgcgcggcatgccgcagatcgaagttaccttcgatatcgatgctgacggtatcctgcacgtttccgcgaaagataaaaacagcggtaaagagcagaagatcaccatcaaggcttcttctggtctgaacgaagatgaaatccagaaaatggtacgcgacgcagaagctaacgccgaagctgaccgtaagtttgaagagctggtacagactcgcaaccagggcgaccatctgctgcacagcacccgtaagcaggttgaagaagcaggcgacaaactgccggctgacgacaaaactgctatcgagtctgcgctgactgcactggaaactgctctgaaaggtgaagacaaagccgctatcgaagcgaaaatgcaggaactggcacaggtttcccagaaactgatggaaatcgcccagcagcaacatgcccagcagcagactgccggtgctgatgcttctgcaaacaacgcgaaagatgacgatgttgtcgacgctgaatttgaagaagtcaaagacaaaaaataatcgccctataaacgggtaattatactgacacgggcgaaggggaatttcctctccgcccgtgcattcatctaggggcaatttaaaaaagatggctaagcaagattattacgagattttaggcgtttccaaaacagcggaagagcgtgaaatcagaaaggcctacaaacgcctggccatgaaataccacccggaccgtaaccagggtgacaaagaggccgaggcgaaatttaaagagatcaaggaagcttatgaagttctgaccgacagccaaaaacgtgcggcatacgatcagtatggtcatgctgcgtttgagcaaggtggcatgggcggcggcggttttggcggcggcgcagacttcagcgatatttttggtgacgttttcggcgatatttttggcggcggacgtggtcgtcaacgtgcggcgcgcggtgctgatttacgctataacatggagctcaccctcgaagaagctgtacgtggcgtgaccaaagagatccgcattccgactctggaagagtgtgacgtttgccacggtagcggtgcaaaaccaggtacacagccgcagacttgtccgacctgtcatggttctggtcaggtgcagatgcgccagggattcttcgctgtacagcagacctgtccacactgtcagggccgcggtacgctgatcaaagatccgtgcaacaaatgtcatggtcatggtcgtgttgagcgcagcaaaacgctgtccgttaaaatcccggcaggggtggacactggagaccgcatccgtcttgcgggcgaaggtgaagcgggcgagcatggcgcaccggcaggcgatctgtacgttcaggttcaggttaaacagcacccgattttcgagcgtgaaggcaacaacctgtattgcgaagtcccgatcaacttcgctatggcggcgctgggtggcgaaatcgaagtaccgacccttgatggtcgcgtcaaactgaaagtgcctggcgaaacccagaccggtaagctattccgtatgcgcggtaaaggcgtcaagtctgtccgcggtggcgcacagggtgatttgctgtgccgcgttgtcgtcgaaacaccggtaggcctgaacgaaaggcagaaacagctgctgcaagagctgcaagaaagcttcggtggcccaaccggcgagcacaacagcccgcgcagtaagagcttctttgatggtgtgaagaagttttttgacgacctgacccgctaacctccccaaaagcctgcccgtgggcaggcctgggtaaaaatagggtgcgttgaagatatgcgagcacctgtaaagtggcggggatcactctacctcaatgtgtatcacaatatccatattctttgtgggggagtctggagattgagtagatattcttgttcagaatgtatcagccgatggttctacgattcttaagccacgaagagttcagatagtacaacggcatgtctcttttgactatctggcaaccggcagtgtgttctctcacgcatcacaaaagcagcaggcataaaaaaacccgcttgcgcgggctttttcacaaagcttcagcaaattggcgattaagccagtttgttgatctgtgcagtcaggttagccttatgacgtgcagctttgtttttgtggatcagacctttagcagcctgacggtccacgatcggttgcatttcgttaaatgctttctgtgcagcagctttgtcgccagcttcgatagctgcgtatactttcttgatgaaagtacgcatcatagagcgacggcttgcgttgtgcttacgagccttttcagactgaatggcgcgcttcttagcacttttgatattagccaaggtccaactcccaaatgtgttctatatggacaattcaaaggccgaggaatatgcccttttagccttcttttgtcaatggatttgtgcaaataagcgccgttaatgtgccggcacagcttacgtagtgatggcgcaggattctaccagcttgcggggtgtgaatacagcttttccgcgataaaaattgcagcaggcggtcagtttcttcccgtgatttgcgccatggcaatgaaaagccacttctttctgattagcgtactcaatcgccggttaaccttgaccgctgtacaaggtatactcggacgatttagcctgttttgagccagacatgaagctgatacgcggcatacataatctcagccaggccccgcaagaagggtgtgtgctgactattggtaatttcgacggcgtgcatcgcggtcatcgcgcgctgttacagggcttgcaggaagaagggcgcaagcgcaacttaccggtgatggtgatgctttttgaacctcaaccactggaactgtttgctaccgataaagccccggcaagactgacccggctgcgggaaaaactgcgttaccttgcagagtgtggcgttgattacgtgctgtgcgtgcgtttcgacaggcgtttcgcggcgttaaccgcgcaaaatttcatcagcgatcttctggtgaagcatttgcgcgtaaaatttcttgccgtaggtgatgatttccgctttggcgctggtcgtgaaggcgatttcttgttattacagaaagctggcatggaatacggcttcgatatcaccagtacgcaaactttttgcgaaggtggcgtgcgcatcagcagcaccgccgtgcgtcaggcccttgcggatgacaatctggctctggcagagagtttactggggcacccgtttgccatctccgggcgtgtagtccacggtgatgaattagggcgcactataggtttcccgacggcgaatgtaccgctgcgccgtcaggtttccccggtgaaaggggtttatgcggtagaagtgctgggcctcggtgaaaagccgttacccggcgtggcaaacatcggaacacgcccaacggttgccggtattcgccagcagctggaagtgcatttgttagatgttgcaatggacctttacggtcgccatatacaagtagtgctgcgtaaaaaaatacgcaatgagcagcgatttgcgagcctggacgaactgaaagcgcagattgcgcgtgatgaattaaccgcccgcgaattttttgggctaacaaaaccggcttaagcctgttatgtaatcaaaccgaaatacggaaccgagaatctgatgagtgactataaaagtaccctgaatttgccggaaacagggttcccgatgcgtggcgatctcgccaagcgcgaacccggaatgctggcgcgttggactgatgatgatctgtacggcatcatccgtgcggctaaaaaaggcaaaaaaaccttcattctgcatgatggccctccttatgcgaatggcagcattcatattggtcacagcgttaacaagattctgaaagacattatcgtgaagtccaaagggctttccggttatgacagcccgtatgtgcctggctgggactgccacggtctgccgatcgagctgaaagtcgagcaagaatacggtaagccgggtgagaaattcaccgccgccgagttccgcgccaagtgccgcgaatacgcggcgacccaggttgacggtcaacgcaaagactttatccgtctgggcgtgctgggcgactggagccacccgtacctgaccatggacttcaaaactgaagccaacatcatccgcgcgctgggcaaaatcatcggcaacggtcacctgcacaaaggcgcgaagccagttcactggtgcgttgactgccgttctgcgctggcggaagcggaagttgagtattacgacaaaacttctccgtccatcgacgttgctttccaggcagtcgatcaggatgcactgaaagcaaaatttgccgtaagcaacgttaacggcccaatcagcctggtaatctggaccaccacgccgtggactctgcctgccaaccgcgcaatctctattgcaccagatttcgactatgcgctggtgcagatcgacggtcaggccgtgattctggcgaaagatctggttgaaagcgtaatgcagcgtatcggcgtgaccgattacaccattctcggcacggtaaaaggtgcggagcttgagctgctgcgctttacccatccgtttatgggcttcgacgttccggcaatcctcggcgatcacgttaccctggatgccggtaccggtgccgttcacaccgcgcctggccacggcccggacgactatgtgatcggtcagaaatacggcctggaaaccgctaacccggttggcccggacggcacttatctgccgggcacttatccgacgctggatggcgtgaacgtcttcaaagcgaacgacatcgtcgttgcgctgctgcaggaaaaaggcgcgctgctgcacgttgagaaaatgcagcacagctatccgtgctgctggcgtcacaaaacgccgatcatcttccgcgcgacgccgcagtggttcgtcagcatggatcagaaaggtctgcgtgcgcagagtctgaaagagatcaaaggcgtgcagtggatcccggactggggccaggcgcgtatcgagagcatggttgctaaccgtcctgactggtgtatctcccgtcagcgcacctggggtgtaccgatgagtctgttcgtgcacaaagacacggaagagctgcatccgcgtacccttgaactgatggaagaagtggcaaaacgcgttgaagtcgatggcatccaggcgtggtgggatctcgatgcgaaagagatcctcggcgacgaagctgatcagtacgtgaaagtgccggacacattggatgtatggtttgactccggatctacccactcttctgttgttgacgtgcgtccggaatttgccggtcacgcagcggacatgtatctggaaggttctgaccaacaccgcggctggttcatgtcttccctaatgatctccaccgcgatgaagggtaaagcgccgtatcgtcaggtactgacccacggctttaccgtggatggtcagggccgcaagatgtctaaatccatcggcaataccgttagcccgcaggatgtgatgaacaaactgggcgcggatattctgcgtctgtgggtggcaagtaccgactacaccggtgaaatggccgtttctgacgagatcctgaaacgtgctgccgatagctatcgtcgtatccgtaacaccgcgcgcttcctgctggcaaacctgaacggttttgatccagcaaaagatatggtgaaaccggaagagatggtggtactggatcgctgggccgtaggttgtgcgaaagcggcacaggaagacatcctcaaggcgtacgaagcatacgatttccacgaagtggtacagcgtctgatgcgcttctgctccgttgagatgggttccttctacctcgacatcatcaaagaccgtcagtacaccgccaaagcggacagtgtggcgcgtcgtagctgccagactgcgctatatcacatcgcagaagcgctggtgcgctggatggcaccaatcctctccttcaccgctgatgaagtgtggggctacctgccgggcgaacgtgaaaaatacgtcttcaccggtgagtggtacgaaggcctgtttggcctggcagacagtgaagcgatgaacgatgcgttctgggacgagctgttgaaagtgcgtggcgaagtgaacaaagtcattgagcaagcgcgtgccgacaagaaagtgggtggcagcctggaagcggcagtaaccttgtatgcagaaccggaactgagcgcgaaactgaccgcgctgggcgatgaattacgatttgtcctgttgacctccggcgctaccgttgcagactataacgacgcacctgctgatgctcagcagagcgaagtactcaaagggctgaaagtcgcgttgagtaaagccgaaggtgagaagtgcccacgctgctggcactacacccaggatgtcggcaaggtggcggaacacgcagaaatctgcggccgctgtgtcagcaacgtcgccggtgacggtgaaaaacgtaagtttgcctgatgagtcaaagcatctgtagtacagggctacgctggctgtggctggtggtagtcgtgctgattatcgatctgggcagcaaatacctgatcctccagaactttgctctgggggatacggtcccgctgttcccgagccttaatctgcattatgcgcgtaactatggcgcggcgtttagtttccttgccgatagcggcggctggcagcgttggttctttgccggtattgcgattggtattagcgtgatcctggcagtgatgatgtatcgcagcaaggccacgcagaagctaaacaatatcgcttacgcgctgattattggcggcgcgctgggcaacctgttcgaccgcctgtggcacggcttcgttgtcgatatgatcgacttctacgtcggcgactggcacttcgccaccttcaaccttgccgatactgccatctgtgtcggtgcggcactgattgtgctggaaggttttttgccttctagagcgaaaaaacaataataaaccctgccggatgcgatgctgacgcatcttatccggcctacagattgctgcgaaatcgtaggccggataaggcgtttacgccgcatccggcaaaaatccttaaatataagagcaaacctgcatgtctgaatctgtacagagcaatagcgccgtcctggtgcacttcacgctaaaactcgacgatggcaccaccgccgagtctacccgcaacaacggtaaaccggcgctgttccgcctgggtgatgcttctctttctgaagggctggagcaacacctgttggggctgaaagtgggcgataaaaccaccttcagcttggagccagatgcggcgtttggcgtgccgagtccggacctgattcagtacttctcccgccgtgaatttatggatgcaggcgagccagaaattggcgcaatcatgctttttaccgcaatggatggcagtgagatgcctggcgtgatccgcgaaattaacggcgactccattaccgttgatttcaaccatccgctggccgggcagaccgttcattttgatattgaagtgctggaaatcgatccggcactggaggcgtaacatgcagatcctgttggccaacccgcgtggtttttgtgccggggtagaccgcgctatcagcattgttgaaaacgcgctggccatttacggcgcaccgatatatgtccgtcacgaagtggtacataaccgctatgtggtcgatagcttgcgtgagcgtggggctatctttattgagcagattagcgaagtaccggacggcgcgatcctgattttctccgcacacggtgtttctcaggcggtacgtaacgaagcaaaaagtcgcgatttgacggtgtttgatgccacctgtccgctggtgaccaaagtgcatatggaagtcgcccgcgccagtcgccgtggcgaagaatctattctcatcggtcacgccgggcacccggaagtggaagggacaatgggccagtacagtaacccggaagggggaatgtatctggtcgaaagcccggacgatgtgtggaaactgacggtcaaaaacgaagagaagctctcctttatgacccagaccacgctgagcgtggatgacacgtctgatgtgatcgacgcgctgcgtaaacgcttcccgaaaattgtcggtccgcgcaaagatgacatctgctacgccacgactaaccgtcaggaagcggtacgcgccctggcagaacaggcggaagttgtgttggtggtcggtagcaaaaactcctccaactccaaccgtctggcggagctggcccagcgtatgggcaaacgcgcgtttttgattgacgatgcgaaagacatccaggaagagtgggtgaaagaggttaaatgcgtcggcgtgactgcgggcgcaagcgctccggatattctggtgcagaatgtggtggcacgtttgcagcagctgggcggtggtgaagccattccgctggaaggccgtgaagaaaacattgttttcgaagtgccgaaagagctgcgtgtcgatattcgtgaagtcgattaagtcattagcagcctaagttatgcgaaaatgccggtcttgttaccggcattttttatggagaaaacatgcgtttacctatcttcctcgatactgaccccggcattgacgatgccgtcgccattgccgccgcgatttttgcacccgaactcgacctgcaactgatgaccaccgtcgcgggtaatgtcagcgttgagaaaactacccgcaatgccctgcaactgctgcatttctggaatgcggagattccgctcgcccaaggggccgctgtgccactggtacgcgcaccgcgtgatgcggcatctgtgcacggcgaaagcggaatggctggctacgactttgttgagcacaaccgaaagccgctcgggataccggcgtttctggcgattcgggatgccctgatgcgtgcaccagagcctgttaccctggtggccatcggcccgttaaccaatattgcgctgttacttagtcaatgcccggaatgcaagccgtatattcgccgtctggtgatcatgggtggttctgccggacgcggcaactgtacgccaaacgccgagtttaatattgctgccgatccagaagctgctgcctgtgtcttccgcagtggtattgaaatcgtcatgtgcggtttggatgtcaccaatcaggcaatattaactcctgactatctctctacactgccgcagttaaaccgtaccgggaaaatgcttcacgccctgtttagccactaccgtagcggcagtatgcaaagcggcttgcgaatgcacgatctctgcgccatcgcctggctggtgcgcccggacctgttcactctcaaaccctgttttgtggcagtggaaactcagggcgaatttaccagtggcacgacggtggttgatatcgacggttgcctgggcaagccagccaatgtacaggtggcattggatctggatgtgaaaggcttccagcagtgggtggctgaggtgctggctctggcgagctaacctgtcacatgttattggcatgcagtcattcatcgactcatgcctttcactgatatccctccctgtttatcattaatttctaattatcagcgtttttggctggcggcgtagcgatgcgctggttactctgaaaacggtctatgcaaattaacaaaagagaatagctatgcatgatgcaaacatccgcgttgccatcgcgggagccggggggcgtatgggccgccagttgattcaggcggcgctggcattagagggcgtgcagttgggcgctgcgctggagcgtgaaggatcttctttactgggcagcgacgccggtgagctggccggagccgggaaaacaggcgttaccgtgcaaagcagcctcgatgcggtaaaagatgattttgatgtgtttatcgattttacccgtccggaaggtacgctgaaccatctcgctttttgtcgccagcatggcaaagggatggtgatcggcactacggggtttgacgaagccggtaaacaagcaattcgtgacgccgctgccgatattgcgattgtctttgctgccaattttagcgttggcgttaacgtcatgcttaagctgctggagaaagcagccaaagtgatgggtgactacaccgatatcgaaattattgaagcacatcatagacataaagttgatgcgccgagtggcaccgcactggcaatgggagaggcgatcgcccacgcccttgataaagatctgaaagattgcgcggtctacagtcgtgaaggccacaccggtgaacgtgtgcctggcaccattggttttgccaccgtgcgtgcaggtgacatcgttggtgaacataccgcgatgtttgccgatattggcgagcgtctggagatcacccataaggcgtccagccgtatgacatttgctaacggcgcggtaagaagcgctttgtggttgagtggtaaggaaagcggtctttttgatatgcgagatgtacttgatctcaataatttgtaaccacaaaatatttgttatggtgcaaaaataacacatttaatttattgattataaagggctttaatttttggcccttttatttttggtgttatgtttttaaattgtctataagtgccaaaaattacatgttttgtcttctgtttttgttgttttaatgtaaattttgaccatttggtccacttttttctgctcgtttttatttcatgcaatcttcttgctgcgcaagcgttttccagaacaggttagatgatctttttgtcgcttaatgcctgtaaaacatgcatgagccacaaaataatataaaaaatcccgccattaagttgacttttagcgcccatatctccagaatgccgccgtttgccagaaattcgtcggtaagcagatttgcattgatttacgtcatcattgtgaattaatatgcaaataaagtgagtgaatattctctggagggtgttttgattaagagtgcgctattggttctggaagacggaacccagtttcacggtcgggccataggggcaacaggtagcgcggttggggaagtcgttttcaatactagtatgaccggttatcaagaaatcctcactgatccttcctattctcgtcaaatcgttactcttacttatccccatattggcaatgtcggcaccaatgacgccgatgaagaatcttctcaggtacatgcacaaggtctggtgattcgcgacctgccgctgattgccagcaacttccgtaataccgaagacctctcttcttacctgaaacgccataacatcgtggcgattgccgatatcgatacccgtaagctgacgcgtttactgcgcgagaaaggcgcacagaatggctgcattatcgcgggcgataacccggatgcggcgctggcgttagaaaaagcccgcgcgttcccaggtctgaatggcatggatctggcaaaagaagtgaccaccgcagaagcctatagctggacacaagggagctggacgttgaccggtggcctgccagaagcgaaaaaagaagacgagctgccgttccacgtcgtggcttatgattttggtgccaagcgcaacatcctgcggatgctggtggatagaggctgtcgcctgaccatcgttccggcgcaaacttctgcggaagatgtgctgaaaatgaatccagacggcatcttcctctccaacggtcctggcgacccggccccgtgcgattacgccattaccgccatccagaaattcctcgaaaccgatattccggtattcggcatctgtctcggtcatcagctgctggcgctggcgagcggtgcgaagactgtcaaaatgaaatttggtcaccacggcggcaaccatccggttaaagatgtggagaaaaacgtggtaatgatcaccgcccagaaccacggttttgcggtggacgaagcaacattacctgcaaacctgcgtgtcacgcataaatccctgttcgacggtacgttacagggcattcatcgcaccgataaaccggcattcagcttccaggggcaccctgaagccagccctggtccacacgacgccgcgccgttgttcgaccactttatcgagttaattgagcagtaccgtaaaaccgctaagtaatcaggagtaaaagagccatgccaaaacgtacagatataaaaagtatcctgattctgggtgcgggcccgattgttatcggtcaggcgtgtgagtttgactactctggcgcgcaagcgtgtaaagccctgcgtgaagagggttaccgcgtcattctggtgaactccaacccggcgaccatcatgaccgacccggaaatggctgatgcaacctacatcgagccgattcactgggaagttgtacgcaagattattgaaaaagagcgcccggacgcggtgctgccaacgatgggcggtcagacggcgctgaactgcgcgctggagctggaacgtcagggcgtgttggaagagttcggtgtcaccatgattggtgccactgccgatgcgattgataaagcagaagaccgccgtcgtttcgacgtagcgatgaagaaaattggtctggaaaccgcgcgttccggtatcgcacacacgatggaagaagcgctggcggttgccgctgacgtgggcttcccgtgcattattcgcccatcctttaccatgggcggtagcggcggcggtatcgcttataaccgtgaagagtttgaagaaatttgcgcccgcggtctggatctctctccgaccaaagagttgctgattgatgagagcctgatcggctggaaagagtacgagatggaagtggtgcgtgataaaaacgacaactgcatcatcgtctgctctatcgaaaacttcgatgcgatgggcatccacaccggtgactccatcactgtcgcgccagcccaaacgctgaccgacaaagaatatcaaatcatgcgtaacgccagcatggcggtgctgcgtgaaatcggcgttgaaaccggtggttccaacgttcagtttgcggtgaacccgaaaaacggtcgtctgattgttatcgaaatgaacccacgcgtgtcccgttctagcgcgctggcgagcaaagcgaccggtttcccgattgctaaagtggcggcgaaactggcggtgggttacaccctcgacgaactgatgaacgacatcactggcggacgtactccggcctccttcgagccgtccatcgactatgtggttactaaaattcctcgcttcaacttcgaaaaattcgccggtgctaacgaccgtctgaccactcagatgaaaagcgttggcgaagtgatggcgattggtcgcacgcagcaggaatccctgcaaaaagcgctgcgcggcctggaagtcggtgcgactggattcgacccgaaagtgagcctggatgacccggaagcgttaaccaaaatccgtcgcgaactgaaagacgcaggcgcagatcgtatctggtacatcgccgatgcgttccgtgcgggcctgtctgtggacggcgtcttcaacctgaccaacattgaccgctggttcctggtacagattgaagagctggtgcgtctggaagagaaagtggcggaagtgggcatcactggcctgaacgctgacttcctgcgccagctgaaacgcaaaggctttgccgatgcgcgcttggcaaaactggcgggcgtacgcgaagcggaaatccgtaagctgcgtgaccagtatgacctgcacccggtttataagcgcgtggatacctgtgcggcagagttcgccaccgacaccgcttacatgtactccacttatgaagaagagtgcgaagcgaatccgtctaccgaccgtgaaaaaatcatggtgcttggcggcggcccgaaccgtatcggtcagggtatcgaattcgactactgttgcgtacacgccagcctggcgctgcgcgaagacggttacgaaaccattatggttaactgtaacccggaaaccgtctccaccgactacgacacttccgaccgcctctacttcgagccggtaactctggaagatgtgctggaaatcgtgcgtatcgagaagccgaaaggcgttatcgtccagtacggcggtcagaccccgctgaaactggcgcgcgcgctggaagctgctggcgtaccggttatcggcaccagcccggatgctatcgaccgtgcagaagaccgtgaacgcttccagcatgcggttgagcgtctgaaactgaaacaaccggcgaacgccaccgttaccgctattgaaatggcggtagagaaggcgaaagagattggctacccgctggtggtacgtccgtcttacgttctcggcggtcgggcgatggaaatcgtctatgacgaagctgacctgcgtcgctacttccagacggcggtcagcgtgtctaacgatgcgccagtgttgctggaccacttcctcgatgacgcggtagaagttgacgtggatgccatctgcgacggcgaaatggtgctgattggcggcatcatggagcatattgagcaggcgggcgtgcactccggtgactccgcatgttctctgccagcctacaccttaagtcaggaaattcaggatgtgatgcgccagcaggtgcagaaactggccttcgaattgcaggtgcgcggcctgatgaacgtgcagtttgcggtgaaaaacaacgaagtctacctgattgaagttaacccgcgtgcggcgcgtaccgttccgttcgtctccaaagccaccggcgtaccgctggcaaaagtggcggcgcgcgtgatggctggcaaaagcctggctgagcagggcgtaaccaaagaagttatcccgccgtactacagcgtgaaagaagtggtgctgccgttcaataaattcccgggcgttgacccgctgttagggccagaaatgcgctctaccggggaagtcatgggcgtgggccgcaccttcgctgaagcgtttgccaaagcgcagctgggcagcaactccaccatgaagaaacacggtcgtgcgctgctttccgtgcgcgaaggcgataaagaacgcgtggtggacctggcggcaaaactgctgaaacagggcttcgagctggatgcgacccacggcacggcgattgtgctgggcgaagcaggtatcaacccgcgtctggtaaacaaggtgcatgaaggccgtccgcacattcaggaccgtatcaagaatggcgaatatacctacatcatcaacaccaccagtggccgtcgtgcgattgaagactcccgcgtgattcgtcgcagtgcgctgcaatataaagtgcattacgacaccaccctgaacggcggctttgccaccgcgatggcgctgaatgccgatgcgactgaaaaagtaattagcgtgcaggaaatgcacgcacagatcaaataatagcgtgtcatggcagatatttttcatccgctaatttgatcgaataactaatacggttctctgatgaggaccgtttttttttgcccattaagtaaatcttttggggaatcgatatttttgatgacataagcaggatttagctcacacttatcgacggtgaagttgcatactatcgatatatccacaattttaatatggccttgtttaattgcttcaaaacgagtcatagccagacttttaatttgtgaaactggagttcgtatgtgtgaaggatatgttgaaaaaccactctacttgttaatcgccgaatggatgatggctgaaaatcggtgggtgatagcaagagagatctctattcatttcgatattgaacacagcaaggcggttaataccctgacttatattctgagcgaagtcacagaaataagctgcgaagttaagatgatccctaataagctggaagggcggggatgccagtgtcagcgactggttaaagtggtcgatatcgatgagcaaatttacgcgcgcctgcgcaataacagtcgggaaaaattagtcggtgtaagaaagacgccgcgtattcctgccgttccgctcacggaacttaaccgcgagcagaagtggcagatgatgttgagtaagagtatgcgtcgttaattttatctcgttgataccgggcgtcctgcttgccagatgcgatgttgtagcatcttatccagcaaccaggtcgcatccggcaagatcaccgtttaggcgtcacatccgtcgtcccctgcaaacgggggcgattttcctccatttgcctcagtggctgcgtttcatgtaagcttacatgacagcgcccgacaagatcctgatactctttggtattcaaccgtttccagtgtaactcgtcgtcactaacattgcgtacagcgcgggctggcgtacccatcaacaactggcgtttctcgccgcgaaagcccgctttgacaaagctcatggcggcaacaatgctctcttcgccaatgaccgcgccatccataatcacgctgttcatcccgaccaatgcatcgcgaccaatcaaacaaccatgcaggatcgctccgtgcccgatatggccgttttccccaacgatagtgtcagtgtcgcagtagccatgcataatgcagccatcctgaatattggctcccgcttgcacgatcaaccgcccgtagtcaccacgcagactggcgagtgggccgatgtagacaccggctcccacaatcacatcgccaatcaagacggcactgggatggacaaacgccgtcgggtgaaccaccggaattaacccctcaaaggcgtaatagctcacggttgttaacgtcctttccacaccggatcgcgcttctcggcaaacgccagcggcccttcaatggcatcttcgctatgcagaacgcttggatagtgtttcaacacgccgctgcgaatatagcgatacgcttcttctaccggcatttcgctggtggtgcggtagatctctttcagcgccgcaatcgccagcggggcgctgttaaccagctgctgagccagttcgcgggcgttatccatcagttccgcctggctaaccacgcggttgactatcccccaacgcagcgcctcttctgcgcccattcgtctgccggtcatcaccatttcattgacgatggcaggcggcaggatcttcggcagacgcagcacaccgccgctgtcaggaacgatgcccagtttggcttccggcagggcgaagctggcgttatcggcacaaacaataaaatctgccgccagcgccagttcaaagccgccgccaaaggcatagccgttcacagctgcgataaccggtttgtcgagattgaaaatttcggttaatcccgcaaaaccacccggaccaaagtcagcatccggtgcttcgccttctgctgccgcttttaaatcccagcccgcggaaaagaacttctctccggcaccggtaataatggcgacacgtaattgcggatcgtcacggaaatttagaaatacttcgcccatttcaaagctggtttttgcatcaatagcattcgcttttggacgatcaagggtaatttccagaatacttccattgcgggtcagatgtaaactttcactcattccttttctccatttttgctttttcagggagctcaacatccctgcaaaaaatgcatattgttttagagtgtgattattagctggcagggtagttccctgctgtttcatttatttcagattctttctaattattttcccgctgcaattacgtggcagatcttttctgatctccagataagagggcactttaaatttcgccatattttgttcgcagaagcggaaaaattcctcttcgctcaatgtttcaccttcattcagcaccacaaatgctttgatggcttcatcgcgaatgctatctttaatacccacaaccacgatgtcctgaattttcgggtgcgcggcgataatattttccagctccacgcaggagacattctcgccgccacgtttaatcatattgcagcggcgatcgacgaaataaaaaaagtcctcttcgtcgcggtatccggtatcgccggtatgcagccagccatcggcttccagcactttcgcagtggcttgtgggttgagaaagtactctttgaagatggttttcccaggtatgcctttaatgcagatttcaccgatctcaccagccgggagcgggcgattgtgatcgtcgcggatctccgcttcgtagcaaaaccccacccgaccaatgctcggccagcgtcgtttatcgccaggacgatcgccgataatgcccacaatggtttccgtcatcccataagacgtcagcaagcgaacgccgaagcgttcacaaaacgcatctttttcctgctcgctcaagttgagataaaacatcacttcccgcaggcggtgttgctgatcgttcgcactaggcggctgtaccatcaacgtacggatcatcatcggaatacattcggtaacggtggcgcggtacttctgtacctgtccccagaaggcgcgggcgctgtatttctcgaccagcacaaaggtggccccggcagaaaacgccgccatcgccgcagtacactggcaatcgatatgaaacgcaggcattaccgtcaggtagacgtcatcgtcacgcagtgcacactgccaggcggagtaatatccagcgaagcgcaggttgtaatgggtaatcaccacacctttcggtcgggaggtggtgccggaggtgaagagaatttccgccgtatcgtcagtgcttagcggcggtgcatagcacaaggtggcaggttgttgatttttcagttgagtaaagctactcacgccatcatcagcgggaagtgccacatctgtcaggcaaatgtgccgcaattgagtggcatcttcctgctgaatctgttgatacataggatagaattgcgcactggtcaccagcaggcacgcctggctattttgcaggatccacgcgctttcctcgcacaacaggcgggcgttaatcggcaccataatcgcgccaatttttgccagcccgaaccagcaaaagataaattccgggcagttgtcgagatgtagtgcaaccttgtcgcctttgcgaatccccagcgtataaaacaggtttgccgtgcggttaatctcctgatttaactcaagataactataccggttaacgactccgccgctggattcacaaatcagcgccgttttatgaccgtaaacgtccgcaagatcgtcccacatttgacgtagatgttgtccgccaatgatatccattgcacctctatccatttttgttcgtttgttattgggcgggcgctagtcaggcaagccgactgacgccacgcgtttagtcctcaactttggccagacctttgctgaccaactcctgaatgtcgttttcgctgtagccgatatttttcaaaatggcagccgtgtccatgccatgactgggcattccgcgccagatttgtccggggttatttttgaatttcggcatgatgttcggccctttgcaggtgcgaccatccatcgtttgccactgagtgatactttcgcgagccacatactgtggattgctttccagttccggtacggtcagcactttggcgcaggcgatattcagttcagcaaagcgttcttttacttccgcgatggtatgtgtcgccagccaggcatcgagtttctcttcaaccagtgggccgtaagggcattcgatacggtggataagctgagtgccttccgggatttctggcgtgccaagcagatgtgcgaggccaatatctttaaagcactcttcaatttgggtaatgcccaccagttccatcacgatgtagccgtcggcacatttatacagaccgcaaccggcgtagtagggatctttacctttgctcatgcgcgggcacatttcgccgccgttgaagtaatccatcatgaagtactggcccatacgcagcatcacttcatacatggcgatgtcgatactttcgcctttaccggtttcacgcactttatgcagtgctgccagcgccgccgtggtggcggtcaggccagaaaagtaatcggcggtatacgggaaggcaggcattggctggtcaacatcaccgttctgaatcaggtaaccactaaaggcctgggcgatagtgttataggccggaagattggtgtactcctcggtgccgtactgaccaaaaccggacaggtgagcgataaccagtttcgggttgtgctgccacagtacttcatcggtaatgccacgacgggcaaaggccggacctttactggcttcgatgaagatatcggtggtttccattaatttcagaaacgcttcgcggccttcatctttgaaaatatttaagctcagcgcgtgcaaattgcggcgggagagttgcgggtagttcggttgaacgcgaatggtgtcggcccaggcgacgttctcgatccagataacttccgcgccccattctgcgaacatttgcccggcaaacggtccggcgatttcgataccggagaagacaacgcgcaatccggccaacggcccgaatttcggcatgggtagatgatccattatttgctcctgaaaaatttatgtagcgcatgactgccggatgcggcgtaaacgctttatccggcctacattcgtgctcccgtaggcctgataagacgcatcagcgtcgcatcaggcagcgcacggacttagcggtattgcttcagcaccgcacgacccagcgtcaggatctgcatttcgtcagatcccccggagacgcggtctacacgcagatcacgccagaagcggctgatgcggtggttgcccgcaatcccgacaccgcccagcacctgcattgcgctatccacaacttcaaatgccgcattggcgcagaagtatttgcacatcgctgcatcgccagaggtgatggtgccgttgtctgctttccacgctgcttcatacagcatgtttttcatggagtttaatttgatcgccatgtgggcgaatttttcctgaatcaactggaaacgaccaatagcctcgccaaactgcacgcgctgattggcgtagcgcgccgcatcttcaaaggcgcacatcgccgtaccgtagttggtgagggctaccaggaaacgttcatggtcgaactcttctttgacgcggttaaagccgttaccttcccgaccgaacatgtctttctcgtccagttccacgtcgtcaaaggtgatttcacagcagctatccatacgcagaccgagcttttcaagtttggtcactttgatgcccggtttgctcatatcaacaaaccattcggtgtagacaggtttgtccggagaagccccgtcgcgcgccatcaccacgatgtacggggtgtaggcgctgctggtaataaaacacttactaccattaagataaatcttaccatttctacgggtataagtcgttttcaggctacccacgtcggagcccgcgcccggttcggtaatcgcactgttccacatctgcttaccggtgccgcggaaagccataattttgtcgatctgctcttgtgtgccttcgcgcaggaaggtgttgaacccgcccggcaactggtacagcacataggttggtgcccccagacgtcccagctccatccacacggcggcgagagtaacaaaccccgcgtccagaccaccgtgctcttcagggatcagcagactgtcgatacccatatccgccagtgctttgacaaaacgttccgggtagacgctgtcacggtcgcactcggcaaaataggcctcccagttttcgctggccatcagttcgcggataccggcgacaaacagttcctgctcatcatttaaattaaaatccatctttcaacctcttgatattttgggggttaattaatctttccagttctgtttcgcgtctttaataaaggagagcgtcaccataatgttgacgaagaacagcgggcatcctccggcgataatggcggtttgaatcggtttcaggccgccgagcgccagcagaacaataccgataatgccaaccagaatactccaaccgatacgcaccagcagaggtggttcttcaccatcgcgtacttcgcggcaagtggacatcgccagggtataagagcaggcgttaaccagcgtaacggtggcaataaagcagaggatgaagaagccccacatggtggcggtgctgagtggcagagcggcccaggtttcaatgatggcgcgcgccacaccgtactgttcgatcagatttggaatgttgatgatgtttttatctatcaacagcagagtgttactaccgagtacagtccacaggatccaggtactcgctgtcagccccagcaccatgccgaagcacagttcacgcacagtacgaccacgggagatgcgggcgaggaagatactcatctggatagcataaatcacccaccatgcccagtagaacacggtccagccctgcgggaagccgcctttagcgatgggatcggtatagaacaacatgcgcggcagatacatcagcaacatccccacgctatcggtgaagtagttcatgatgaagctggcaccgctgacaatgaacacccaacccagcatcaggaagctcaggtaactacgcacgtcactggcgatacgtacccctttttgcagaccgcaagcgacgcaaatggcgttgaggataatccagcaggtaatgatgatagcgtccagttgcagggtatgcggaatgccaaacaaccattgcatacactcggtcaccagcggcgtggcaaggcccagactggtacccatcgcgaagatcaaggcgacgagatagaagttgtcgacgatagtgccgaacaaccctttggcgtgtttttcacctaccagcggcaccagtgtgctgctggggcgaatcacttccattttgcggacaaagaagaagtaagcgaaggcgacactaaggaagctgtaagtggcccacggcagaggtccccagtggaacaagctgtaagccagccccaactctttcgcccctgtgctgttcggttctaagccaaacggcggggtggagatgtagtagtagatctcaatgcttccccagaacagtacggcagcagacgtacaggaggcgaacatcataaagatccaactggcggtgctaaattctggcggttcgttacctaaacgctttttggcatacgggccaaacaccagccagaaccaaccgaaaagcatcaccaccatataccattcaaatgcccatccccatacattggtgacgtaactgaatacagcattaataacgacattcgctgcatccagatctctgactgtaagccaacaaagtatgccgacgattattaacggcggaaagaaaaccttcggttctattcccgtttttctcttttcattcttcatgagttaattccactgtgaaaacgaatatttattttgcgttcccgtttgttttatttttgttaacatttaatataattattattaacctcgtggacgcgttaatggctaactcataatgggtattcaataagctgtattctgtgattggtatcacatttttgtttcgggtgaatagagggcgttttttcgttaattttgattaataatcagtttgttatgctctgttgtgagtaaaaaataacatctgactttcaatattggtgatccataaaacaatattgaaaatttctttttgctacgccgtgttttcaatattggtgaggaacttaacaatattgaaagttggatttatctgcgtgtgacattttcaatattggtgattaaagttttatttcaaaattaaagggcgtgatatctgtaattaacaccaccgatatgaacgacgtttccttcatgatttctggagatgcaatgaagattattacttgctataagtgcgtgcctgatgaacaggatattgcggtcaataatgctgatggtagtttagacttcagcaaagccgatgccaaaataagccaatacgatctcaacgctattgaagcggcttgccagctaaagcaacaggcagcagaggcgcaggtgacagccttaagtgtgggcggtaaagccctgaccaacgccaaagggcgtaaagatgtgctaagccgcggcccggatgaactgattgtggtgattgatgaccagttcgagcaggcactgccgcaacaaacggcgagcgcactggctgcagccgcccagaaagcaggctttgatctgatcctctgtggcgatggttcttccgacctttatgcccagcaggttggtctgctggtgggcgaaatcctcaatattccggcagttaacggcgtcagcaaaattatctccctgacggcagataccctcaccgttgagcgcgaactggaagatgaaaccgaaaccttaagcattccgctgcctgcggttgttgctgtttccactgatatcaactccccacaaattcctagcatgaaagccattctcggcgcggcgaaaaagcccgtccaggtatggagcgcggcggatattggttttaacgcagaggcagcctggagtgaacaacaggttgccgcgccgaaacagcgcgaacgtcagcgcatcgtgattgaaggcgacggcgaagaacagatcgccgcatttgctgaaaatcttcgcaaagtcatttaattacaggggatgctatgaacacgttttctcaagtctgggtattcagcgataccccttctcgtctgccggaactgatgaacggtgcgcaggctttagctaatcaaatcaacacctttgtcctcaatgatgccgacggcgcacaggcaatccagctcggcgctaatcatgtctggaaattaaacggcaaaccggacgatcggatgatcgaagattacgccggtgtcatggctgacactattcgccagcacggcgcagacggcctggtgctgctgccaaacacccgtcgcggcaaattactggcggcaaaactgggttatcgccttaaagcggcggtgtctaacgatgccagcaccgtcagcgtacaggacggtaaagcgacagtgaaacacatggtttacggtggtctggcgattggcgaagaacgcattgccacgccgtatgcggtactgaccatcagcagcggcacgttcgatgcggctcagccagacgcgagtcgcactggcgaaacgcacaccgtggagtggcaggctccggctgtggcgattacccgcacggcaacccaggcgcgccagagcaacagcgtcgatctcgacaaagcccgtctggtggtcagcgtcggtcgcggtattggcagcaaagagaacattgcgctggcagaacagctttgcaaggcgataggtgcggagttggcctgttctcgtccggtggcggaaaacgaaaaatggatggagcacgaacgctatgtcggtatctccaacctgatgctgaaacctgaactgtacctggcggtggggatctccgggcagatccagcacatggttggcgctaacgcgagccaaaccattttcgccatcaataaagataaaaatgcgccgatcttccagtacgcggattacggcattgttggcgacgccgtgaagatccttccggcgctgaccgcagctttagcgcgttgatccactctggcagggctgcattttggccctgccgctgacagggagctcttatgtccgaagatatctttgacgccatcatcgtcggtgcagggcttgccggtagcgttgccgcactggtgctcgcccgcgaaggtgcgcaagtgttagttatcgagcgtggcaattccgcaggtgccaagaacgtcaccggcgggcgtctctatgcccacagtctggaacacattattcctggtttcgccgactccgcccccgtagaacgcctgatcacccatgaaaaactcgcgtttatgacggaaaagagtgcgatgactatggactactgcaatggtgacgaaaccagcccatcccagcgttcttactccgttttgcgcagtaaatttgatgcctggctgatggagcaggccgaagaagcgggcgcgcagttaattaccgggatccgcgtcgataacctcgtacagcgcgatggcaaagtcgtcggtgtagaagccgatggcgatgtgattgaagcgaaaacggtgatccttgctgatggggtgaactccatccttgccgaaaaattggggatggcaaaacgcgtcaaaccgacggatgtggcggttggcgtgaaggaactgatcgagttaccgaagagcgttattgaagaccgttttcagttgcagggtaatcagggggcggcttgcctgtttgcgggaagtcccaccgatggcctgatgggcggcggcttcctttataccaatgaaaacaccctgagcctggggctggtttgtggtttgcatcatctgcatgacgcgaaaaaaagcgtgccgcaaatgctggaagatttcaaacagcatccggccgttgcaccgctgatcgcgggcggcaagctggtggaatattccgctcacgtagtgccggaagcaggcatcaacatgctgccggagttggttggtgacggcgtattgattgccggtgatgccgccggaatgtgtatgaacctcggttttaccattcgcggtatggatctggcgattgccgccggggaagccgcagcaaaaaccgtgcttagtgcgatgaaaagcgacgatttcagtaagcaaaaactggcggaatatcgtcagcatcttgagagtggtccgctgcgcgatatgcgtatgtaccagaaactaccggcgttccttgataacccacgcatgtttagcggctacccggagctggcggtgggtgtggcgcgtgacctgttcaccattgatggcagcgcgccggaactgatgcgcaagaaaatcctccgccacggcaagaaagtgggcttcatcaatctaatcaaggatggcatgaaaggagtgaccgttttatgacttctcccgtcaatgtggacgtcaaactgggcgtcaataaattcaatgtcgatgaagagcatccgcacattgttgtgaaggccgatgctgataaacaggcgctggagctgctggtgaaagcgtgccccgcaggtctgtacaagaagcaggatgacggcagtgtgcgcttcgattacgccggatgtctggagtgcggcacctgtcgcattctggggctggggagcgcgctggaacagtgggaatacccgcgcggcacctttggtgtggagttccgttacggctgatgttggtttgatacgtaacgccgcactgactctcattgcaaaaaacaggaataaccatgcaaccgtccagaaactttgacgatctcaaattctcctctattcaccgccgcattttgctgtggggaagcggtggtccgtttctggatggttatgtactggtaatgattggcgtggcgctggagcaactgacgccggcgctgaaactggacgctgactggattggcttgctgggcgcgggaacgctcgccgggctgttcgttggcacaagcctgtttggttatatttccgataaagtcggacggcgcaaaatgttcctcattgatatcatcgccatcggcgtgataagcgtggcgacgatgtttgttagttcccccgtcgaactgttggtgatgcgggtacttatcggcattgtcatcggtgcagattatcccatcgccaccagtatgatcaccgagttctccagtacccgtcagcgggcgttttccatcagctttattgccgcgatgtggtatgtcggcgcgacctgtgccgatctggtcggctactggctttatgatgtggaaggcggctggcgctggatgctgggtagcgcggcgatcccctgtttgttgattttgattggtcgattcgaactgcctgaatctccccgctggttattacgcaaagggcgagtaaaagagtgcgaagagatgatgatcaaactgtttggcgaaccggtggctttcgatgaagagcagccgcagcaaacccgttttcgcgatctgtttaatcgccgccattttccttttgttctgtttgttgccgccatctggacctgccaggtgatcccaatgttcgccatttacacctttggcccgcaaatcgttggtttgttgggattgggggttggcaaaaacgcggcactagggaatgtggtgattagcctgttctttatgctcggctgtattccgccgatgctgtggttaaacactgccggacggcgtccattgttgattggcagctttgccatgatgacgctggcgctggcggttttggggctaatcccggatatggggatctggctggtagtgatggcctttgcggtgtatgcctttttctctggcgggccgggtaatttgcagtggctctatcctaatgaactcttcccgacagatatccgcgcctctgccgtgggcgtgattatgtccttaagtcgtattggcaccattgttagcacctgggcactaccgatctttatcaataattacggtatcagtaacacgatgctaatgggggcgggtatcagcctgtttggcttgttgatttccgtagcgtttgccccggagactcgagggatgagtctggcgcagaccagcaatatgacgatccgcgggcagagaatggggtaaattgttcagatttctctcttttctgaatcaatattattgactataagccgcgtgaatatatgactacactttgtgggaaaacaaaggcgtaatcacgcgggctacctatgattcttataatttatgcgcatccgtatccgcatcattcccatgcgaataaacggatgcttgaacaggcaaggacgctggaaggcgtcgaaattcgctctctttatcaactctatcctgacttcaatatcgatattgccgccgagcaggaggcgctgtctcgcgccgatctgatcgtctggcagcatccgatgcagtggtacagcattcctccgctcctcaaactttggatcgataaagttttctcccacggctgggcttacggtcatggcggcacggcgctgcatggcaaacatttgctgtgggcggtgacgaccggcggcggggaaagccattttgaaattggtgcgcatccgggctttgatgtgctgagccagccgctacaggcgacggcaatctactgcgggctgaactggctgccaccgtttgccatgcactgcacctttatttgtgacgacgaaaccctcgaagggcaggcgcgtcactataagcaacgtctgctggaatggcaggaggcccatcatggataattaaggaatggcaggaggcccatcatggatagccatacgctgattcaggcgctgatttatctcggtagcgcagcgctgattgtacccattgcggtacgtcttggtctgggaagcgtacttggctacctgatcgccggctgcattattggcccgtgggggctgcgactggtgaccgatgccgaatctattctgcactttgccgagattggggtggtgctgatgctgtttattatcggcctcgaactcgatccacaaaggctgtggaagctgcgtgcggcagtgttcggctgtggcgcattgcagatggtgatttgcggcggcctgctggggctgttctgcatgttacttgggctgcgctggcaggtcgcggaattgatcggcatgacgctggcgctctcctctacggcgattgccatgcaggcgatgaatgaacgcaatctgatggtgacgcaaatgggtcgcagtgcctttgcggtgctgctgttccaggatatcgcggcgatcccgctggtggcgatgattccgctactggcaacgagcagtgccagcacgacgatgggcgcatttgctctcagcgcgttaaaagtggcgggtgcgctggtgctggtggtattgctggggcgctatgtcacgcgtccggcgctgcgttttgtagcccgctctggcttgcgggaagtgtttagtgccgtggcgttattcctcgtgtttggctttggtttgctgctggaagaggtcggcttgagcatggcgatgggcgcgtttctggcgggcgtactgctggcaagcagcgaataccgtcatgcgctggagagcgatatcgaaccatttaaaggtttgctgttggggctgtttttcatcggtgttggcatgagcatagactttggcacgctgcttgaaaacccattgcgcattgtcattttgctgctcggtttcctcatcatcaaaatcgccatgctgtggctgattgcccgaccgttgcaagtgccaaataaacagcgtcgttggtttgcggtgttgttagggcagggcagtgagtttgcctttgtggtatttggcgcggcgcagatggcgaatgtgctggagccggagtgggcgaaaagcctgaccctggcggtggcgctgagcatggcagcaacgccgattctgctggtgatcctcaatcgccttgagcaatcttctactgaggaagcgcgtgaagccgatgagatcgacgaagaacagccgcgcgtgattatcgccggattcggtcgttttgggcagattaccggacgtttactgctctccagcggggtgaaaatggtggtactcgatcacgatccggaccatatcgaaaccttgcgtaaatttggtatgaaagtgttttatggcgatgccacgcggatggatttactggaatctgccggagcggcgaaagcggaagtgctgattaacgccatcgacgatccgcaaaccaacctgcaactgacagagatggtgaaagaacatttcccgcatttgcagattattgcccgcgcccgcgatgtcgaccactacattcgtttgcgtcaggcaggcgttgaaaagccggagcgtgaaaccttcgaaggtgcgctgaaaaccgggcgtctggcactggaaagtttaggtctggggccgtatgaagcgcgagaacgtgccgatgtgttccgccgctttaatattcagatggtggaagagatggcaatggttgagaacgacaccaaagcccgcgcggcggtctataaacgcaccagcgcgatgttaagtgagatcattaccgaggaccgcgaacatctgagtttaattcaacgacatggctggcagggaaccgaagaaggtaaacataccggcaacatggcggatgaaccggaaacgaaacccagttcctaataaagagtgacgtaaatcacactttacagctaactgtttgtttttgtttcattgtaatgcggcgagtccagggagagagcgtggactcgccagcagaatataaaattttcctcaacatcatcctcgcaccagtcgacgacggtttacgctttacgtatagtggcgacaattttttttatcgggaaatctcaatgatcagtctgattgcggcgttagcggtagatcgcgttatcggcatggaaaacgccatgccgtggaacctgcctgccgatctcgcctggtttaaacgcaacaccttaaataaacccgtgattatgggccgccatacctgggaaagtatcggtcgtccgttgccaggacgcaaaaatattatcctcagcagtcaaccgggtacggacgatcgcgtaacgtgggtgaagagcgtggatgaagccatcgcggcgtgtggtgacgtaccagaaatcatggtgattggcggcggtcgcgtttatgaacagttcttgccaaaagcgcaaaaactgtatctgacgcatatcgacgcagaagtggaaggcgacacccatttcccggattacgagccggatgactgggaaagcgtattcagcgaattccacgatgctgatgcgcagaactctcacagctattgctttgagattctggagcggcggtaattttgtatagaatttacggctagcgccggatgcgacgccggtcgcgtcttatccggccttcctatatcaggctgtgtttaagacgccgccgcttcgcccaaatccttatgccggttgctcggctggacaaaatactgtttatcttcccagcgcaggcaggttaatgtaccaccccagcagcagccggtatccagcgcgtatataccttccggcgtacctttgccctccaggcttgcccagtgaccaaaggcgatgctgtattcttcagcgacagggccaggaatcgcaaaccacggtttcagtggggcaggggcctcttccgggctttctttgctgtacatatccagttgaccgttcgggaagcaaaaacgcatacgggtaaaagcgttggtgataaaacgcagtcttcccagcccccgcaattccggactccagttatttggcatatcgccgtacatggcatcaagaaagaagggataggagtcactgcttagcaccgcttctacatcgcgtgcgcactctttggcggtctgcagatcccactgcggcgtgatccctgcgtgggccatcaccagctttttctcttcgtcgatttgcagcagaggctggcgccgcagccagttaagcagctcgtcggcatccggcgcttccagcagcggtgtcaggcgatctttcggtttattgcggctgatcccggcaaataccgccagcagatgcagatcgtgattgcccagcaccagacgtacgctgtcgcctaaggatttcacatagcgcagaacatccaggctacccggcccgcgcgcgaccagatcgcccgtcagccagagggtatctttcccaggggtaaattctactttatgcagcaatgcgatcagttcatcgtaacaaccatgaacgtcgccaataaggtatgtcgccatattcttttaatgaatgagtgtgggaacggcgagtcggaatacgggaatgtcgatgctgaaagggacgccattttcatcgatcatttcgtagtgaccctgcatggtgcccagcggggtttcaatgattgcaccgctggtgtactggtactcttcgccaggcgcgataagtggctggacgccaaccactccttcgccctggacttcggtttcacggccattgccattggtgatcagccagtaacgccccaacaactgcactggcgctcgccccagattgcgtatggttacggtataagcaaaaacgtaacgttcattatcaggactagattgagcctcaatgtagacgctttgaacctgaatacacactcgggggctattgatcatcgttaactctcctgcaaaggcgcgttctccgccagatagttcgccatctggcaatattgcgcgacagagatattttccgctcgcatcgccgggtcgatccccattcccgttaacacctcgacgctaaacaggttgccgaggctgttacgaatggttttacgacgctggttaaaggcttcggtggtgatgcggctcaacacacgaacatctttaaccgggtgaggcatcgttgcatgaggaaccaggcgcacgacggcggaatccactttgggtggtggtgtaaaggcactcggcggtacttccagtaccgggatcacattgcaatagtattgcgccatgacgcttaatcgaccatacgctttgctgttcggtcctgcaaccagacgattcaccacctctttttgcaacataaagtgcatgtcggcaatggcatcagtatagctaaacagatggaacatcaacggcgtggagatgttataaggcaggttgccgaaaacacgcagcggctgacccattttctcggccagttcaccaaagttaaaggtcatcgcatcctgctgataaatcgtcagtttcgggcctaagaatggatgcgtttgcagacgtgccgccagatcgcggtcaagttcgatgaccgtcagctggtccagacgttcgccgaccggttcggtcaatgccgccagaccggggccgatttcgaccatcgcctggcccttttgcgggttaatggcagacacaatactgtcgatcacgaactgatcgttgagaaagttttgcccgaagcgtttacgggctaagtggccctggtggactcgattattcattgggtgttaacaatcattttgatggcgagattaagcgccgtaataaaactgccgacatcggctttgccacgtcccgccagttcaagcgcggtgccgtggtccacacttgtgcgaataaagggcaggcccagcgtaatgttcacaccgcgcccgaagccctggtattttagcacgggaagaccctgatcgtggtacatcgccagcacggcgtcggcgttatcaagatatttcggctgaaacagggtatcggcaggcagcggcccgttgagtttcatcccctgcgcccgcagctcattgagcaccggaataatggtgtctatctcttccgtacccatatgaccgccttcgcccgcgtgcggattcagcccgcagaccagaatgcgcggttcggcaataccaaatttggtccgcaaatcgtgatgcaaaatagcaatcacttcgtgcaaaagtgcaggggtgatagcgtctgcgatatcgcgcagcggtaaatgcgtcgttgccagcgccacgcgaagttcttcggtcgccagcatcatcaccacctttttcgcctggctacgctcttcgaaaaactcggtatgaccggtaaaaggaatgccagcgtcgttaataacgcctttatgcaccggacctgtgatcagcgcggcaaattcgccgttcagacaaccatcgcacgctcgcgccagcgtttccaccacataatgcccattttcaaccgctaactgccccgcagtgacaggtgcacgtagcgcgacaggaagtagcgttaatgtgcccgcagtttgcggttgtgcaggggagttgggggaataagggcggagggtgagcggcaaaccgagcatcgctgcccggttggtaaggagagtggcatcggcacaaacaaccagttcgaccggccactcacgctgtgcaagctggacaactaagtccgggccaatcccggcgggctcgccgggagtgatcacaacacgttgggttttaaccattagttgctcaggattttaacgtaggcgctggcacgttgttcctgcatccagcttgctgcttcttcgctgaacttacggttcatcagcatgcggtatgcacgatctttctgcgcagcgtcggttttatcgacattacgggtatccagcagttcgattaaatgccagccgaaactagagtgaaccggtgcactcatttgacctttgttcaggcgagtcagggcgtcacggaaggccggatcgaaaatatctggtgtagcccagccgagatcgccgccctggttagcagagcctggatcctgagagaactctttcgctgcggcagcaaaagtcgttttaccactcttgatatcagcagcaatctgttccagtttcacacgggcctgttcgtcagtcatgatcgggctcggtttcagcagaatatggcgagcatgaacttcggtcacgctgatatttttgctttcgccgcgcaggtcgttaactttcagaatatggaagccaacgccggaacgaatcgggccaacaatgtcgcctttcttcgcggtgcttaatgcctgggcgaagatcccgggcaactcctgaatacggccccagcccatctggccgccgttcagcgcctgctggtcggcagaatgagcaatcgccagcttaccgaaatcagcgccgttacgcgcctgatcgacaatggcgcgcgcctggctttccgcttcgttcacctgatcagaggtcgggttttccggcagcgggatcaggatgtggctcaggttcagctcagtgctggcgtcgttttggttacccacctgctgcgccagggattcgacttcctgcggcaggatggtgatgcgacgacgcacctcgttgttacgcacttcagagataatcatctctttgcggatctggttacgataggtgttgtagttcagtccatcgtaagccagacggctgcgcatctgatccagcgtcatgttgttctgtttcgcgatgttagcaatcgcctgatccagctgctcatcggagattttcactcccattttctgccccatctgcaggatgatttgatccatgatcaaacgttccatgatttggtggcgcagcgtcgcgtcatcaggaagttgctgccttgcctgagcagcgttcagttttacgctctgcattaatccatcaacgtcgctttccagcacgacgccgttattgacgacggctgcgactttatcgactacctggggggcagcgaaactggtattcgcgatcatggcgataccgagaagcagcgttttccagttcttcatactttttccatttcaattaaccgcactgcggattacgtggtaaatcaacaaatcacaaagtgttttgatacggcagaatgttgctacgcagcatctcttgcgtacccagaccgtagttggagctcaggccgcgaagttcgatgttaaagccgattgcgttgtcatataccgcatgttgtttatcgttatcccaaccgttcagcttccgctcgtaaccgacgcgaattgcatagcagcaggagctgtattgcacacctaacatagagtcggcttgcttgttagcattggtgtcgtagtagtaggccccaacaatggaccaacgatcggcaattggccagctggcgacagcacctacctggctaataccattcttatattgctcagcagtggaatagtacttaggcagcgtagcctgaatatattccgggctggcgtaacggtaattcagctgtaccagacggtcttcatcccgacggtattcaatgctggagttactggtcgctacgttatccagacgtgtatcgtactgaatcccgccacgcaatccccaacgctcggagatacgccagtaagtatcgcctgcccacaccagactacccgttttgtcgtcattctcccatgttatgttgtcatcgccagtgcgagactccgtgaaatagtagatttgaccaacggaaatattaaaacgttcaacggcagcatcatcatatatgcgagatgtgacaccggtcgtcacctggttagcggaggcaatacggtcaagaccgccgtaagtccggtcccggaacaggccagagtagtcagattgcagcagagagctgtcgtagttatagatgtcgctctgatcgcgatacggcacgtacaaatactgcgcgcgcggttccagcgtttgggtataacccggagccagcatttccatatcgcgttcaaagaccattttgccgtcaactttgaattgcggcattacgcggttaacggattcgtccagcttggtcgtgtttctggagttataccagtcaagattggtttgctgataatgggttgccagcaacttcgcttcggtattgatgctgccccagttattagagagcggcaaattgatggtcggttccaggtgaacacgggttgcttcaggcatgtcgtctctggtgttaacaaagtgcactgcctggccgtaaatacgcgtatcaaacggaccaacatcattctggtagtaattaacgtctaactgcggctctgcgctgtagctactggtgttctgttcgctgaaaacctggaactgcttggtactaacggtggcattgaagttttgcaccgcatagccaacgctgaatttttgcgttgcgtagccgtcagtactggaaccgtacttgttatcgaaatcattgaagtagctaggatcgctgaccttggtgtagtcgacgttgaaacgccacacctgatccatgaccccggagtggttccagtagaataaccaacgacgactactgtcatcgttcgggtgttcatcttcatagactttatcactaggcagatagtccagttccatcaagccagcgcccgcctgggagaggtagcggaattcgttctcccacatgatgttgccacgacgatgcatataatgcggcgtgatggtggcatccatatttggcgcgatgttccagtaatatggcaggtagaactcaaagtagttggtggtggtgtacttggcgttcgggatcaagaaaccagagcgacgtttgtcacccaccggcaactgcaaataggggctataaaagatcggtaccggacccaccttaaagcgggcgttccagatctccgcaacttgttcttcgcggtcatgaataatttcgctacctaccacgctccaggtgtcagaacccggcagacaggaggtaaagctaccgttatccagaatggtatagcggttttcgccacgttgtttcatcaggtccgctttaccgcgaccctggcgacccaccatctggtaatcaccttcccagacgttggtatctttggtgttcagattcgcccagcctttcggccctttgaggatcacctggttatcgtcgtaatggacattaccgagcgcatcaacggtacgtaccggctccggttgtcctggtgcctctttttgatggagctgcacttcgtcggcctgcagacggctgttaccctgcatgatatccacgctgccagtaaacacggcgtcatccgggtagtcccctttcgcgtggtcagcattgatagtcacgggtaagtcattggtatcgccctgtaccagaggacggtcatagcttggcacgcccaacatgcactgactggcgaggtcggctgccagtccctgttgactataaagggcggtggcaatcatggtggccaggagagtggggatacgttttttcatacgttgattttattgttccatcatcggtaacgttgcgcgtgacaaacggtcagagactaacgtactcgtcatctctacgctagtgttaatcctgtccgaatagcgtcagtggtgttaggcacggcattgaatgacaggtatgataatgcaaattataggcgatgtcccacaattgaccgcagccggaaaacggtaaaagcacctttatattgtgggagatagccctgatatccgtgtgtcgatttggggaatatatgcagtattggggaaaaatcattggcgtggccgtggccttactgatgggcggcggcttttggggcgtagtgttaggcctgttaattggccatatgtttgataaagcccgtagccgtaaaatggcgtggttcgccaaccagcgtgagcgtcaggcgctgttttttgccaccacttttgaagtgatggggcatttaaccaaatccaaaggtcgcgtcacggaggctgatattcatatcgccagccagttgatggaccgaatgaatcttcatggcgcttcccgtactgcggcgcaaaatgcgttccgggtgggaaaaagtgacaattacccgctgcgcgaaaagatgcgccagtttcgcagtgtctgctttggtcgttttgacttaattcgtatgtttctggagatccagattcaggcggcgtttgctgatggtagtctgcacccgaatgaacgggcggtgctgtatgtcattgcagaagaattagggatctcccgcgctcagtttgaccagtttttgcgcatgatgcagggcggtgcacagtttggcggcggttatcagcagcaaactggcggtggtaactggcagcaagcgcagcgtggcccaacgctggaagatgcctgtaatgtgctgggcgtgaagccgacggatgatgcgaccaccatcaaacgtgcctaccgtaagctgatgagtgaacaccatcccgataagctggtggcgaaaggtttgccgcctgagatgatggagatggcgaagcagaaagcgcaggaaattcagcaggcatatgagctgataaagcagcagaaagggtttaaatgaccctgtaaatgatgctgagtaactgcccacgattaaaggtggccgccctggcggtcacttctttgagaaaaggcgtttactcagaatggtggacaggctcaatgcacgatttacgggaggggttctgtaggttttatcgcgttgaccctgcttaaggttgagagctttacgacgagcggaattatatttttacgtcttaaaaataaaaaacacatacctgaatgagcgatttttgaaagtatatttattcagaacgcgcatcatgagtttttaactcaatgcgaggctattaccatgaaagtaagtgttccaggcatgccggttacacttttaaatatgagcaagaacgatatttataagatggtgagcggggacaagatggacgtgaagatgaatatctttcaacgcttgtgggagacgttacgccatctgttctggagtgataaacagactgaggcttataaacttctgttcaatttcgtgaataaccagactggcaacatcaacgccagtgaatactttactggggctatcaacgagaatgagagagaaaagtttatcaatagcctggaattattcaataaacttaaaacatgcgcaaaaaatccggatgagttggtcgcaaagggcaatatgcgctgggtcgcccagaccttcggggatatcgagttaagtgtcacttttttcattgaaaagaataagatatgtactcagacgttgcagctgcataagggccaaggtaacttgggcgttgatcttagaaaggcttaccttcccggcgttgacatgagggattgttaccttggtaaaaaaacaatgaaaggtagcaatgatatcctttatgagagacctgggtggaatgctaacctgggcgtgctaccccggacggtgctaccccggacggtgctaacccggacggtgctaacctggacggtgctaccgtgaacggtgctacctccttatatgatgaggtaattattattaataaaatcccccccaaaaaaattgatactaaaggagttgctactgaagaagttgctactaaaaaagtactgctgaacaaattactgacaacgcaattattgaatgagccagaataagctaaggttgaaggggctggaacgccccttcaaccttagcagtagcgtgggatgatttcacaattagaaagacctgcatgatgagctagagaagaggctagtgacgcaaggcgtcgtgcaggacacggatcaccgagatgggcatcgccaaccagactgctaattagcccatgaataacaatcagaaaggaccataacagacccgttaaaatgaaatataagagacggtcaacgggtgaagaaaaagttcaaaaattcgctgtggagcaggaagggaattaccgaatggaaagcgtagccacacgcaacaactgaaagcagtttggcagaaacaaaaaatccccggactcggggatttatgtacaagaggcagcccttaggatgagggtataaacgtacaggaaaggttaaaaatccgctggcgctttaaacgtcatactattgccatacgccggatgggtaatcgtcaacatctctgcatgtagcaacaaacgtggtgccatcgctctcgcttctggacttgcataaaaacgatcgccgagaatcggatgacccagcgccagcatatgcacacgcaattgatggctacgcccggtaatcggttttaacaccactcttgccgtgttatccgccgcatactccaccacttcatattccgtctgcgcaggtttacccgtttcgtaacagactttctgtttcgggcggtttggccagtcgcaaatcagcggcagatccaccagaccttctgcgggggatggatgcccccagacgcgggccacatactgctttttcggctcgcgctcgcggaactggcgttttaactcccgctccgcggctttggtcagcgccactacaatcacgccgctggtagccatatccagacgatgcacgctttctgcctgcggataatcacgctgaatgcgcgtcatcacgctgtctttgtgctcttccagacgacccggcacactcaacaaaccgctcggcttgttgaccaccataatatggtcatcctgatacaggataaccaaccagggttcctgcggtggattgtagttttccatccccattttcggctccgttactgatgcgttacaacgatcaaacgcagggcatccagacgccaacctgcctgatccaggctttccattacctgctgacggttgctctcaatggcggtcagttcgtcgtcacgaatgttcgggttcactgcacgcagagcttccagacgagacagctcggcagacagtttttcgtcggcttcgttacgcgctgcatcaatcaatgcacgggcagatttctcgatctgcgcttcacccagttgaaggatagcgtgaacatcctgctgcacggcgttaaccagtttgctgccggtgtgacggttaaccgcgttaagctggcggttaaaggtttcaaactctacctgcgccgccaggttgttgccgtttttatccagcagcatacgtaccggcgtcggtggcaggaagcggttgagctgcaactgcttcggagcctgggcttcaaccacataaatcagttccaccaacagcgtacctaccggcaacgctttgttttttaacagactaatcgtgctgctaccggtatcgccagaaaggatcagatccagaccgttgcggatcagcggatgctcccaggtaataaactgtgcatcttcacgcgccagcgccacttcacgatcaaaggtgatggtgatgccatcttcgctcaggccagggaagtccggcaccagcatatgatcggacggcgtcagcacgatcatgttgtcgccgcgatcgtcctgattgataccgataatatcgaacaggttcatggcgaaggcgatcaggttggtatcgtcatcctgctcttcaatgctttctgccagtgcctgggctttttcgccaccgttggagtggatttccagcaggcggtcacgaccctgttccagctgtgctttcagcgcttcatgttgctcgcggcagtttttgatcagatcgtcaaagccttcggtttgatccggactagccagatagttaatcagatcgttgtatacgctatcgtaaatagtgcgtccggtcgggcaggtgtgctcaaatgcatccagaccttcgtgataccagcgcaccagcacgctctgagcggttttctccagataaggcacatggatctgaatatcgtgcgcctggccgatacgatccagacgaccaatacgctgctccagtagatccgggttgaatggcaggtcaaacatcaccatgtggctggcgaactggaagttacgtccttcagaaccgatttcactgcacagcagtacctgtgcgccggtgtcttcttcggcaaaccaggcggcagcgcggtcacgttcgataatgctcataccttcgtggaacaccgcagcgcgaataccttcacgttcgcgcagtacctgctccagttgcagcgcagtggcagctttggcgcagatcaccagcactttctgagagcgatggctggtcaggtagcccatcagccactcaacgcgcggatcgaagttccaccaggtggcgttatcaccttcaaattcctgataaatacgctccgggtagagcatatcgcgagcacgatcttccgcacttttacgtgcgcccataatgccggagactttaatagccgtctgatactgcgtcggtagcggcagcttaatggtgtgcagctcgcgtttcgggaatcctttcacaccgttacgcgtgttacggaacagcacgcggctggtgccgtggcgatccatcagcatgctaaccagctcctgacgggcgctctgggcatcttcgctgtcgctgtttgctgcctgcaacagcggctcgatatcctgctcgccgatcatctcgccgagcatgttcagttcgtcattgctcagtttgttacctgccagcagcatggcaacggcgtccgcaaccggacgataatttttctgctcttcaacgaactgcgcaaaatcgtggaaacggttcgggtccagcagacgcagacgggcgaagtggctttccatccccagctgttccggggtcgcggtcagcagcagaacgcccggcacgtgctctgccagttgttcaatggcctgatattcacggcttggcgcatcttcgctccacaccaggtgatgcgcttcatcgaccaccagcaggtcccattcggcttcacagagatgttccaggcgctgtttgctacgacgggcaaaatccaggctgcaaatcaccagctgttcggtgtcaaacgggttgtaagcatcgtgctgagcttcggcataacgctcatcatcaaatagcgcaaagcgcaggttgaaacggcgcagcatttctaccagccactgatgctgtaaggtttccgggacgataattagcacacgttcagcagcgccagagagcagttgctgatgcaggatcatcccggcttcaatggttttccctaaacccacttcgtcagccagcaggacgcgcggcgcgtggcggcgaccaacatcatgagcgatgttgagctgatgcgggatcaggctggtacgctgaccgcgcaggccgctgtacggcatacggaactgttcgctggaatatttacgcgcgcgataacgcagcgcaaagcggtccatacggtcaatctgcccggcaaacagacggtcctgcggtttgctgaacaccagtttgctatcaaggaaaacttcacgcagggctacgccggactcttcagtatccaggcgagtaccgatataggtcagcaagccattttcttcttttacttcttcgacttgcatctgccagccgtcatggctggtaatggtatcaccagggttgaacatcacgcgggtcacgggggaatcactgcgtgcgtacagacggttttcaccagtagatgggaaaagtaaagtgacagttcgcgcatccaccgcgacaacggttccaagtcccaattcgctttctgtatcgctgatccagcgttgaccaagtgtaaaaggcatatgtgttcggctctatatctttaattgcaggcaataaccacccgctaccgtgcttatgaggtagtggtgttattcaggtccaggaatggaaagggcgctatggtactggatggcaaagcattcgtcacgcatcaaaatggtatctggcgaactcttttttttgctcaaaatagcccaagttgcccggtcataagtgtagcaaaattatcctcaataaaagggagtattccctccgccacgggttgtagctggcgggtcagatagtgttcgtaatccagtggactacgttggtagtccagcggctccgggccgttggtggtccatacgtacttaatggtgccgcgattctgatattgcaaggggcgaccacgcttttggttttcttcatcggcaaggcgagcggcgcgtacatgaggcggcacattacgctgatactcgctcagcggacggcgaaggcgtttacggtaaaccagtcgcgcatccagttcacccgccatcagtttgtcgatggtttcgcgtacatattcctgatatggctcgttgcggaagatgcgcaggtatagctcctgctgaaactgctgggccagcggcgtccagtcggtgcgcacggtttccagccctttaaacaccatccgctgcttgtcgccctcctgaatcagtccggcataacgctttttactgccggtatcggctccgcgaatggttggcatcagaaaacggcagaaatgggtttcatactccagttctaatgcgctggtcagccgttgtttttgcagcgtttccgcccaccaggcgttaacgtgctgcaccagtgcacgaccgattttcgccgcttcttcttcgctatgtgcgcctttcagccagacaaacgtactgtcggtatcgccgtagataacgtcgtagccctgtgcttcaatcaacgctttggtttgccgcatgatctgatgaccacgcatggtgatgctgcttgccagccgcggatcgaagaagcggcaggcggtggtgccgagcacgccataaaaggcattcatgatgattttcagcgcctggctcagcggtttgttaccctggcgtttggcttcatcgcgcccgtgccagatgttagtcacaatctccggcaggcaatgtttttctcggctgaaccaggcatcgagaaaaccttcggtactgtgctctggatcaggctgcgccatgccttccaccagcccgacgggatcaatcagaaaggtgcggatgatgctcgggtacaggcttttatagtccagcaccagcacactatcataaagccctggccgactatccatcacgtagccgccagggctggcgtgcggcggcacttcgccgagattaggcgcgacataaccagcgcgatgcattcgcggaaaatagagatgaccaaatgccgccacgctaccgccgtgtcggtccaccggcaggccgttcaccgttgcccgttcgagtaaaaatggcatgatttcagttttgtggaagatctgcgtcaccagctcgcaatctttcaggttataagttgccagcgcaggtttatcttcggcgaaacggcggtcaatttcgtccattcgatcccacgggttatcgatagattttccttcgcctaatagctcctgagcgacagtttccaggctgaaactagagaaattccagaacgcggatttcagcgcctcgataccgtcgataattagccgacctttagcctgggcaaaaaagacgccgtttttaaagccgtgctcgcgccactccagctcgctattatcgcgcccaagacgcagcggaagacggtaacgctcggcatgtttttgcagcattcgcagatcgaactgcaccacgttccaaccgatgatcacatcaggatcgtagttggcaaaccaggcgttgagtttttccagcaactgcgggcggctggcgacgtattccagttcgaaatcaaggctggaggcgtcgccattctccggccccagcatataaacgatgcgctgcccgcagccttccaggccgatgcagtacagctcaccgtggcgggtggtttcaatatctatagaaacccacttgagcggcggacgatagtcgggatgcggtttcagacgggcattaacgatagtgccattgtgcatatcaccctcgacccacaccggactggtgataaaccgctccatcagatagcgttctggcggacgcacatcggcctcgtagacggtaacgccaccttcacgcaggcgcttttcgtaattcatcaattggcgatgggcgcgacagtaaaggccatacaccggctggcggtgaaaatcctttaacgccagcggtgtcaggcgaaagccttgttcaccctgcaaaatatgctgagcgcggggaacctgatcggcgggaataaacgccacggactcttgcggtgcaagcgtaacctgcaacggcccgttgtccgtcgccagccagaaggagacttctgtcccttgcggggtgtcccgccagtgtcgggttaagataaaacctgcctgcgccacgctgaaaatccatcaaaaaaccaggcttgagtatagcctggtttcgtttgattggctgtggttttatacagtcattactgcccgtaatatgccttcgcgccatgcttacgcagatagtgtttatccagcagcgtttgctgcatatccggtaactgcggcgctaactgacggcagaatatccccatataagcgacctcttccagcacgatggcgttatgcaccgcatcttcggcatttttgccccatgcaaacgggccgtgggaatggaccagaacgccgggcatttgcgctgcatcgataccctgtttttcaaaggtttctacgatgacgttaccggtttcccactcatattcgccgttgatttctgcgtcggtcattttgcgggtgcagggaatggtgccgtagaaatagtcggcgtgggtggtgccggttgctggaatgctctgacccgcctgcgcccagatggtggcgtggcggctgtgcgtatgcacaatgccgccaatggaggggaatgcctgatagagcagccggtgagttggcgtgtcggaggagggctttttcgtaccttcaaccacttcaccggtttcgatgctaaccacgaccatatcgtcagcggtcatgacgctgtaatcgacgccggaaggtttgatcacaaagacgccgcgctcgcgatcaacggcgctgacgttgccccatgtgagcgtgaccaggttgtgttttggcagcgccaggttggcttctaatacctggcgtttgagatcttctaacatgttgactccttcgtgccggatgcgctttgcttatccggcctacaaaatcgcagcgtgtaggcctgataagacgcgccagcgtcgcatcaggcgttgaatgccggatgcgctttgcttatccggcctacaaaatcgcagcgcgtaggcctgataagacgcgccagcgtcgcatcaggcgttgaatgccggatgcgctttgcttatccggcctacaaaatcgcagcgtgtaggccagataagacgcgtcagcgtcgcatcaggcgttacataccggatgcggctacttagcgacgaaacccgtaatacacttcgttccagcgcagcgcgtctttaaacgctggcaggcgtgtgtcgttatcaatcaccgtgatttcaatgtcgtgcatctcggcgaattggcgcatatcgttgaggttcagtgcatggctgaagacggtatggtgcgcgccaccagcgaggatccacgcttcggaagcagttggcagatccggttgcgctttccacagcgcattcgccaccggcagtttcggcagggagtgcggtgttttcaccgtgtcgatgcagttaaccagtagacggtaacgatcgccgagatcaatcaagctggcgacaatcgctgggccggtttgggtattgaagatcaggcgggcaggatcgtccttaccaccaataccgagatgctgaacgtcgaggatcggtttctcttctgcggcgatgctcgggcagacttccagcatatgggagccgagcaccaggtcattacctttctcgaagtgataggtgtagtcctccataaaggaggtgccgccctgcagaccggtactcatcaccttcatgatgcgaagcagggcggcagttttccagtcgccttcgcccgcaaagccgtaaccctgctgcatcagacgctgtacggccagaccaggaagctgtttcagaccgtgcaaatcttcaaaggtggtggtgaacgcgtggaagccaccttgttccaggaaacgcttcatccccagctcaatacgcgccgcttccagcacgttctgtcgttttttgccgtggatttgtgtggcaggcgtcatggtgtagcagctttcgtactcatcgaccagcgcgttaacatcgccgtcgctgatggagttcaccacctgcaccagatcgccaaccgcccaggtattgacggagaaaccgaacttgatctgtgcggcaactttatcgccatcggtgaccgccacttcacgcatgttatcgccaaatcggcagactttcagatgacgggtatcctgtttagagaccgcctgacgcatccaggagccgatacgctcatgggcttgtttatcctgccagtgaccggtaaccacggcatgttgctgacgcatacgcgcgccaatgaagccgaactcgcgaccgccatgtgcagtctggttcaggttcataaagtccatatcgatactgtcccacggcagcgccgcgttgaactgggtgtggaattgcagcaacggtttgttgagcatggtcaggccgttgatccacattttggccggggagaaggtgtgcagccacaccaccagaccagcgcaacgatcgtcgtaattcgcgtcgcggcaaatagcggtgatttcatccggcgtggtgcccagcggtttcaacaccagtttgcagggcagtttcgcttccgtattcagcgcattaacgacgtgctcggcatgttgggtgacctgacgcagggtttccgggccatacagatgctggctgccaatgacaaaccacacttcataattatcaaaaatcgtcattatcgtgtccttatagagtcgcaacggcctgggcagcctgtgccggggcggaagttggaagatagtgttgttcggcgctcatcgcccattgctgatagcggcgataaagctgttcaaagcgttgtgcctgctcgctgcacggttgcagggttttctctaccgcactggccattttttgctgagcacttgggatgtctgcgtgcactttcgcggcgacggcagcaaaaatcgccgcaccgagcgcacagcactggtcagaggcaacaatttgcagcgggcgattcagcacgtcgcagcaggcctgcataatgacctggtttttccgcgcgatgccgcccagtgccatcacgttattaacggcgatcccctgatcggtaaagcactccatgattgcgcgtgcgccaaaggcggtggcagcaatcaaaccgccgaacagcagcggagcgtcggtagcgaggttaagatcggtaatcacccctttcaggcgttggttagcgttcggtgtgcggcggccgttaaaccagtcgagcaccaccggcaggtgatccagagacggatttttggcccatgcttcggtcagcgccggaagcagttgtttctggctggcgttgatttgcgttttcagttccggatgctgggcggcaagctgttccagcggccagccgagtacgcgaccaaaccaggcgtagatatcaccaaacgcgctttggcctgcttccagaccgataaatccaggcaccacgctgccatcaacctgaccgcaaatacctttaactgcccgctcgccaacgctctgtttgtcggcaatcagaatgtcgcaggtggaagtaccgataacttttaccagtgcgttaggctgtgcgcctgcgccaactgcgcccatatggcagtcaaacgcgccgccggaaatcaccacgctttcaggcaggccgagacgctgcgcccattccgggcataaggtgcccaccggaatatcggcagtccaagtgtcagtgaacagcggggaaggcaaatggcgattgaggatcgggtccagctcatcaaagaaactggctggcggcaggccgccccagctttcgtgccacagagatttatgcccggcgctgcaacgtccgcgacgaatatcctgcgggcgggtggtaccggaaagcagagctggcacccagtcgcacagctcaatccagcttgcggcagattgcgccacggcgctgtcctggcgagtcacatgcaggatttttgcccagaaccattcgctggaataaataccaccaatgtagcgggagtagtcaacgttgcccggcgcgtggcacaaacgggtaatctcttccgcttcttcaaccgcagtgtggtctttccacaatacgaacatcgcgttcgggttttcggcaaactccgggcgcagcgccagcacgtttccgtcggcatcaatcggtgcgggcgtgctgccggtactgtcaacgccaatcccgaccacagctgcgcgctgttcgacgctaagctctgcaagcacggttttcagtgccgcttccatactctcaatgtagtcacgcggatgatgacggaactggttattcggggcatcacaaaattgccctttctgccaacggggataccactctacgctggtggcgatctcttcaccggtagcgcagtccaccgccaaagctcgcacagaatcactgccaaaatcgaggccaattgcaatcgccatcgtttcactccatccaaaaaaacgggtatggagaaacagtagagagttgcgataaaaagcgtcaggtaggatccgctaatcttatggataaaaatgctatggcatagcaaagtgtgacgccgtgcaaataatcaatgtggacttttctgccgtgattatagacacttttgttacgcgtttttgtcatggctttggtcccgctttgttacagaatgcttttaataagcggggttaccggttgggttagcgagaagagccagtaaaagacgcagtgacggcaatgtctgatgcaatatggacaattggtttcttctctgaatggtgggagtatgaaaagtatggctgaagcgcaaaatgatcccctgctgccgggatacagctttaacgcccatctggtggcgggtttaacgccgattgaggccaacggttatctcgatttttttatcgaccgaccgctgggaatgaaaggttatattctcaatctcaccattcgcggtcagggggtggtgaaaaatcagggacgagaatttgtctgccgaccgggtgatattttgctgttcccgccaggagagattcatcactacggtcgtcatccggaggctcgcgaatggtatcaccagtgggtttactttcgtccgcgcgcctactggcatgaatggcttaactggccgagtatatttgccaatacgggtttctttcgcccggatgaagcgcaccagccgcatttcagcgacctgtttgggcaaatcattaacgccgggcaaggggaagggcgctatagcgagctgctggcgataaatctgcttgagcaattgttactgcggcgcatggaagcgattaacgagagcctccatccaccgatggataatcgggtacgcgaggcttgtcagtacatcagcgatcacctggcagacagcaattttgatatcgccagcgtcgcacagcatgtttgcttgagcccgagccgtctgagtcatcttttccgccagcagttagggattagcgtcttaagctggcgcgaggaccaacgcattagtcaggcgaagctgcttttgagcactacccggatgcctatcgccaccgtcggtcgcaatgttggttttgacgatcaactctatttcagccgagtatttaaaaaatgcaccggggccagcccgagcgagtttcgtgccggttgtgaagaaaaagtgaatgatgtagccgtcaagttgagttaattggtaacgaatcagacaattgacggcttgacggagtagcatagggtttgcagaatccctgcttcgtccatttgacaggcacattatgcaagcattgctggaacactttattacccaatccaccgtgtatagtttgatggcggtggtgttggtggcctttctggagagcctggcgctggtcggtttgattctacccggtacggtgctgatggcggggctgggagcgctgattggcagcggcgagttaagtttctggcacgcctggctggcagggattattggctgcttgatgggcgactggatttctttctggctgggttggcgttttaaaaagccgttgcatcgctggagttttctgaagaaaaacaaagcactacttgataaaactgaacatgcgttgcatcaacacagcatgttcaccattctggtcggtcgttttgttggcccgacgcgtccgctggtgccaatggtggcgggaatgctggatctgccggtggctaaatttattacgccgaatattatcggctgcctgctgtggccgccgttttacttcctgccagggattctggcgggcgcggcgatcgatattcctgccggaatgcagagcggtgagtttaaatggttgctgctggcaacagcggtgtttttgtgggttggtggctggctgtgctggcggttatggcgcagcggtaaagcgactgaccgtttgagtcattatttgtcccgcggtcgtttgttgtggctgacgccgttgatttctgccatcggcgtggtggcgctggtggtgttaattcgccacccgttgatgccggtgtatatcgatattttgcgtaaagtggttggggtttaagagatagtcttgtgcgggttgcctgatgcgacgcttgccgcgtcttatcaggcctacaaaacgcactacccgtaggtcggataaggcgttcacgccgcatccgacagtgcatattaacccgtaatccccaatagtgcgctagcactcgccttaccgctcaacaactcattggtcataccctgccaggcgatgcgcccgtcggcgactactacgctgcgcgtggcgatccgcgccgcatcttccacgctgtggctcaccatcaatagcgtcattttttgctgctggcagctcgtgctcaccagcgtcaacatctcctgacgtaacgccggatcgagcgcagagaacggttcatcgagcaataaaatcggctgttcgcgtaccagacaacgcgctaacgccactcgctgtcgctgaccgccggaaagctcgcccggtaaccgcgccattaaattatcaatccccatctggcgggcgatagcgtgcattttcccctgctgtaccgcgttcagtttcaatcccggatttagccccagcccgatgttctgtgcgaccgtcaggtggctgaacaggttgttctcctgaaacagcatgctcaccggacggcgactcggcggcatagttgtgtgatctacgccatcgatagtcaggctaccgctggctggcgtcagaaaaccggcgatcaaattcagcagggtacttttacccgcgccgcttggcccgaggatcgccacctgctcgccgcgttccaccgttaagctaaaacgcatcggcaaatggtggtaaagccaggtgatatcagtcagttttaacatttcgccccggtagtttttcaatcacggtaaacagcagaaaacagagcagcagcagaattaacgcggtgaccgcaccgtcctggctgcgataggagccaatttgctggtagagataaaacggcagggtgcggaaatcatcgttaccgaacaacgccaccacgccaaaatcaccaatgctcagcacgcatgcaaaggccagcgcctgcgccagtggacgtttcagggcgcgcagctccaccacttttaagcgactccagccttcaatccccaggctctgacataacatgctgtagcgggcggtgatatcgcgcatcgggttttccagcactttcagcgcataagggatcgccattaacgcattggtgaaaatcacaatgccgtcagcagattgtggcaggccgatagtgttgttgagcagtaaaaagaagccggtagccagcacaatccccggcatggcgaggatcaacatgccgctcatctccagcacctgacccgccagcattttctgccgcgcccgcagttcgcgactgctccatagcagcatcatggtcagcactacgcacaatacacctgccgccagcgcaatacgcaagctggtccacagcgcctgccacagcaccggttgtgccagcacttccggcaactggcgatttaccccatcgacgatcaccgccagtaacggtggcagcaacagcagcagcgccagcacaattaacaccgtgtcgcaaatgcggctatgcagacgatcgtccgggtcgcgccagccttgcagcagcgtggtgccgggcgcaatggccttactcaatcgctgactcaacagcaccagcccgaggcagcacaccatctggagcagcgccagcattgccgcgcgggcaggatcgtagtcgtaactcagcgcctgatagattgccagctcgatagtggtcgcctgcggaccgccccccaggcttagcacggtggcgaagctggcgaaacagagcataaagataagcgcagcaaccggcgggatttgtcgccgtaaccacggccattcgacgaagcggaaaaaatgccagctacgcatcccaagctgggcggcaagttgacgctgttcgccggggatgttttccagtgcctggagtaataagcggctcgccatcggcagattaaaaaacacatgggccagcaaaataccttgcaggccgtaggggctaaaggtccactccagaccgaggctttggcagagtgttgccagccagccctggcgaccatagacgctaagaatgccgaaaacagcgaccaacaccgggaggatcaaggtcattgcacacagacgcaacagcgccagccgacccggaaagcgcctgcgatagagcgcgcgggcgaggaatatcgcgggtatgacagagagcagtgcgctgagaaacgcctgccagaaggagaagcgcaccacatgccacagatagctgtcctgccagactgccacccagtcatcctgcggcgcgttccaccacagggcgagaaacgccgccagcgcaaccgctaccaccagcgtggtggcgcttacacctggaattaaccagccgggaattaacggctgacggcgcgttgccattcgctaatccatgcctgacgttgtgccgccacttcggctggcgtgaactccaacgtggttgcgggtttggtcaatttttcaaaaccggcaggcagcgtgacgtttgccaccggatacatccagttgccggttgggatcgcattctggaaagccggagaaaccataaactggaggaatttttgcgccagctccggctgcttgctggcagcggtgcgggcggcgacttccacttgcagatagtgaccttcgctgaagttcgcggcggcgtagttatctttcttctcttcgagaatgtgataagccggagaggtggtgtaactcagtaccagatcgctttcaccttttaaaaacaggccgtaggcttcgctccagcctttggtgaccgtgaccgttttcttcgccagtttctgccaggcttgtggggcgtcatcgccatagactttttgcatccatagcaacagacccagccccggtgtactggtgcgcggatcctgataaatcacccgccagttttgatcgctctcaaccagttctttcaggctttgtggcgggtttttcagtttgttcttgtcataaacgaaggcgaagtagccataatcaaacggtacgaaagtgtcattattccagccgccgggaacgttaacggcatccgctgccacaccgcttttggcaaacagtccggttttactggcggcgtctaacaggttgttatccagccccagcaccacatcggctttactgtttttgccttccatccgtagacggttgagaaggctaacgccatcttccagcgccaccagtttcagttcgcaattacagtcggcttcaaaggcttttttaaccaccggaccaggcccccagtcggcggcgaaggaatcgtaggtataaacagtcagaacgggtttagcgaaaacgggcgctgtgcacagcaacagcaggggcagacatttttttaacactttgcacctcaaaaaagagtggcaaaggacttgagaaggagcctcaaatcccttcgccggcgttatccggatcaggttcgacgggtattttctcagcgcacgcgtacgcgtggcaccccgttgagaacggcgttagtgtagtgattttgttatcaaccagcaatcatggatccggtggcgcaaaccacgcacttttaaaatcgaaccagccgagggtattcatgcgcaggccgcgcatactgcgttgcccctgaatgatcagccagtggtgcaataatggcaccatcgctttgctggcgaccagttgctggcaccagttcgccagattcatctcgccattgcgccagcgagcagcgtcggcttgccagtcaatgggaatgcaatgttgtagcagtggcacttcgcataaatgtgcgaaaacagagaagtccagcggcagggtaaagttggcgctgtttagccagatatcactttcgatctctcctgtatgccactgatcgtagtcgatctctttgattttcagcgtgacctggtgacttgccagaatctgctgcatgatcccggcaatcacccgatgctcactgtgatcctgataaaaggttagggtgaggctttccaggccagccggtttttcgctctttatggtgcgggcatggtgccaacgggggagcagtccataagccgggaaccacagttgctggtactgttcctcagcgaaatagaccagattagttggagaaagcacatagcttacccagtccctgacttgctgattcgccccgcgatgggtgcggctgtcgaacagtaaatagtagcaaccttcctccaggcggctttcaatctctttttcctcgccctgtggaccttttagcatcagccctccggctggctcgtcggcaatttccggcagaacccagacgttaacttcgtcgattaatgcccggtaaccgaagaagtcatcgaatgcctgaattttcagttgattggtgctgttgcgaatcaccgcatacggaccggtgccgatgggatggctggcaaagttactgagggtttcccattcgcgcggcaggatcatcgccggaacttgccccagcagtaacggtaaccagcggtccggttgcgtgagatggatatccagcgtccagggcgtcgggctcacaatgtcagcaatatggctatagagcggcagcgtattgattcgttttaaagaggcgatcacatcgtccatttccagttcacgaccatggtgaaaatggactcctggacgcaaaaagaaacgccagtgaagcggactaatttgctgccagtggtgggcgatgtctgcttccagttccccattttcctcatttatgcgcgttaggctactgaagatttgccgggcgatatgggtttcggaacggcgcaatgcgctgccaggtagcagattacgcaacggacgatagtagagcacgcgcaggatgtgccgcccctggcggaagctgcggcccagatgagaaaccagcatttgccgcacagtcgctttgtcgccaaccaactgcaccagttgatcgatacgatcctgctccagcaggtcttccgcccgctgttgctgaagcgccagcccggtatagaggaatgtcagacggctgcgtttaccgcgcccgacttccgcttcccacgtcagccagccgcgatcctgcatggtgttgagcagggtgcgcatatgacgacggctgcagctcaataacgctgccagttcgttgagcgttgtgtcctggcttttaccctcgcagcattgccacaggcggatgaactgttgttgcagacgagcagatggcataaaaggggaactcctgtgcaaaagacagcaattttattttccctatattaagtcaataattcctaacgatgaagcaagggggtgccccatgcgtcagttttatcagcactattttaccgcgacagcgaagttgtgctggttgcgttggttaagcgtcccacaacgattaaccatgcttgaaggactgatgcagtgggatgaccgcaattctgaaagttgacttgcctgcatcatgtgtgactgagtattggtgtaaaatcacccgccagcagattatacctgctggttttttttattctcgccgcgctaaaaagggaacgtatgatctggataatgacgatggctcgccgtatgaacggtgtttacgcggcatttatgctggtcgcttttatgatgggggtggccggggcgctacaggctcctacattgagcttatttctgagtcgtgaggttggcgcgcaacctttctggatcggcctcttttatacggtgaatgctattgctgggatcggcgtaagcctctggttggcaaaacgttctgacagtcagggcgatcggcgaaaactgattatattttgctgtttgatggctatcggcaatgcgctattgtttgcatttaatcgtcattatctgacgcttatcacctgtggtgtgcttctggcatctctggccaatacggcaatgccacagttatttgctctggcgcgggaatatgcggataacagcgcgcgagaagtggtgatgtttagcagcgtgatgcgtgcgcagctttctctggcatgggttatcggtccaccgttggcctttatgctggcgttgaattacggctttacggtgatgtttagcattgccgccgggatattcacactcagtctggtattgattgcatttatgcttccgtctgtggcgcgggtagaactgccgagcgaaaatgctttaagtatgcaaggtggctggcaggatagtaacgtacggatgttatttgtcgccagcacgttaatgtggacctgcaacaccatgtacattattgatatgccgttgtggatcagtagcgagttaggattgccagacaaactggcgggtttcctgatggggacggcagctggactggaaataccagcaatgattctggctggctactatgtcaaacgttatggtaagcggcgaatgatggtcatagcagtggcggcaggagtactgttttacaccggattgattttctttaatagccgtatggcgttgatgacgctgcaactttttaacgctgtatttatcggcattgttgcgggtattgggatgctatggtttcaggatttaatgcctggaagagcgggggcagctaccaccttatttactaacagtatttctaccggggtaattctggctggcgttattcagggagcaattgcacaaagttgggggcactttgctgtctactgggtaattgcggttatttctgttgtcgcattatttttaaccgcaaaggttaaagacgtttgatgacgtggacgatagcggaaagcccggtcatttgaccgggcaaggggattaattcataaacgcaggttgttttgcttcataagcggcaatggcgtcgtcgtgctgcaaggtaagcccaatactgtccagaccgttcatcatgcagtggcggcggaaggcatcgatggtaaagcgataggttttctctcccgctttcacctcttgcgcttccagatccacgtcgaaatggatccccggattagctttcaccagcgcaaacagttcgtccacttctgcatcgcttaatttcaccggcagcagctggttgttaaagctattgccgtagaagatgtcagcaaaactcggcgcaatcaccactttaaaaccgtagtcggtcaatgcccagggcgcgtgctcacggctagagccacagccgaagttttctcgtgccagcaaaatggaagcgccctgatactgcgggaagttcagcacgaagtccgggtttggctgttggcctttttcatccagaaaacgccagtcgttaaacagatgcgcgccaaaacccgtacgggtcactttctgcaaaaactgtttcgggatgattgcatcggtatcgacattggcggcatccagcggaaccaccaggcctgtgtgtttgataaatttctctgccatggtgtgctccttatttaatgttgcgaatgtcggcgaaatgtccggtcacagcagcagcggcagccattgccgggctgaccagatgcgtgcgcccgccgcgcccctggcggccttcaaagttacggttgctggtggaggcacaacgttcgcccggattcagacggtcgttgttcatcgccagacacatactgcagccaggcaagcgccattcaaaaccggcttcaataaagattttatccagaccttccgcttccgcctgggcttttaccgggccagagccgggaaccaccagtgcctgcacgcctggcgcgacttttcgccctttggcgatctccgctgccgcgcgtaaatcttcaatgcggctgttggtacaggaaccgataaacactttgtcgatagccacttcggtcagcggaatacccggtttcagccccatataggccagcgctttttctgcgctcgcgcgttcaaccggatcggcaaagctagccggatcgggaatattgtcgttcacggaaatcacctggccgggattggtgccccaggtgacctgcggactaatttcttctgcttgcagagtgacaacggtatcgaaagttgcgccttcgtcggtttgcagggttttccagtaggcaacggcgtcgtcgaaatctttgcctttcggcgcatgcagacggcctttgacatagttaaaggtggtttcgtccggtgcaaccagaccggcttttgcgcccatttcgattgccatattgcacagggtcatacgaccttccatgcttaaatcacggattgcttcgccgcaaaactccaccacatgcccggtgccgcctgcgctaccggttttaccgataattgccagcacgatatcttttgcggtaatgcccggcgcggctttgccctggacttcaattttcatggtttttgcgcggccctgtttcagggtttgcgttgccagtacgtgttcaacttcggaagtgccgataccaaaggccagtgcgccaaacgcgccgtgggtggcggtatggctgtcgccgcagacaatggtcatccccggcaaggtgacgccctgttccggccccattacgtggacgatcccctgatacgggtgattcaggtcatacagttcgacgccaaattctttgcagtttttgatcagttcctgcatctggatacgcgccatttcaccgcaggcattaatgtctttggtctgggtagagacgttgtgatccatggtagcgaaggttttgcccggctgacgtaccgggcgaccgtgggcgcgcagaccatcgaacgcctgcggactggtcacttcatgcaccaggtggcggtcgatatataacagtggggtttcgttttcggcttcgtacacaacgtgagcgtcgaacaatttttcgtataacgtcttagccatgattacaccccttctgctacatagcgggcaatgatatcgcccatttcatcggtactaacggcggcagcgccacgggctaaatccccggtgcgaatgccttcttctaatgcgcggttaatggcgcgttcaatggcgcaagccgcatcatcggcatccaggctgtaacgcagcagcagtgccaggctaaggatttgtgcaatcgggttggcgatgtttttgcctgcgatatctggtgcgctgccgcccgccggttcatacagtccaaaaccttgctcgttcaggctggcggaaggcaacatccccatgctgccagtgatcattgcgcactcgtcagacagaatgtcgccaaacaggttggagcacagcagaacgtcaaactgacttggatctttaatcagctgcatggtggcgttgtcgatgtacatatgcgccagttcgacatccgggtattccgtggcgatctcgttaacgatctcccgccataaaatagaggattgcagcacgttggctttatcgatgctcgtcactttgtggcgacgcttgcgagcagattcaaacgcgatgcgggcgatacgttcgatctcaaaacggtgatacacctcggtatcaaaggctttttcatattgtccgctaccttcgcggccttttggctgaccgaaatagatgccgccggtcagttcgcgcacacacaggatgtcgaagccgtttgcggcaatgtctgcacgcagcggacagaatgcttccagcccctgatacagttttgccgggcgcaggttgctgaataatttgaagtgcttacgcagaggcagcagcgcgccgcgttctggttgctggtctggtggtaaatgttcccacttcgggccgcctacgctgccaaacagcacggcatcggcttgctcacaaccttcaaccgtcgcaggcggcagtggttgcccgtggttatcaatggctgcgccgcctacatcgtaatggctggtggtgatgcgcatcgcaaagcggttgcgcacggcatccagcactttcagcgcctgggtcatcacttccggaccaataccgtcccccggcaatacggcaatatggtaattcttgctcatcacacggtttccttgttgttttcgttgtgttgagctttgcgttgcaactctttttcgacttctgcggcacgccagatattgttcagaacgtgcaccatggctttggcagaactctcgacaatatcggtagccaggccgacgccgtggaagcggcgaccgttgtagttagcgacgatatccacctgacccagcgcatctttaccgtggcctttggcggtcaggctgtatttcaccagttcgacgttatattcagtgatgcggttaattgcctgatagacggcatcgaccggaccgttaccgttggcggcttctgctttgacttcttcgccacaggccagtttgacggcggcggtggcgatatcgttagagccagactgcacgctgaagtaatccagacggaaatgctccggctcttcttgctgcttaccgatgaaggccagcgcctccagatcgtaatcaaacacctgaccttttttgtccgccagcttcaggaaagcatcgtacaaattgtctaaattatattcactttctttataccccatctcatccatgcgatgtttcaccgccgcacgcccgctacgagaggtcagattcagctggatttggttcagaccaatagattctggtgtcatgatttcgtagttttcgcggtttttcagcacgccatcctggtgtataccggaggagtgtgcgaatgcgccgctgccaacaatggctttgtttgccgggatcggcatattacaaatctggctaactaactggctggtgcgccatatctcctggtgattaatggcggtgtggacgttgagaatatccttacgaactttgatcgccatgatgacttcttccagggaacagtttccggcacgctcgccgatcccgttcattgcgccttccacctggcgtgcaccggcatgtaccgccgccagactgtttccgaccgccaggcccaaatcgtcgtgggtatgtacggagataatggctttgtcgatgttaggcacgcgttcatacaggccgctgatgattccggcgaactcaaacggcatggtgtagcccacggtgtccggaatgttgatggtggtggcaccggcattaatcgccgcttcgaccactcgcgccagatcggcaatgggtgtacgcccggcatcttcgcaagaaaattcaacatcatcggtgtaattacgggcgcgtttcaccatatagatagcgcgttcgatcacctcgtccagcgtgctgcgcagcttggtggcgatgtgcattgggctagtggcaataaaggtatgaatacggaaggcttcggcgactttcagggattcggccgccacgtcgatatctttttccacgcagcgagctaacgcacatacgcggctgtttttaacctggcgggcgatggtttgcacgctttcaaaatcgcccgggctagagacggggaaaccgacttccatcacgtcaacacccatacgctcaagggccagcgcaatttgcagtttttctttcacactcaagcttgcctgtaacgcctgttcaccgtcgcgcaatgtggtatcgaaaataatgacttgctggctcatggtttgggtccttgtctcttttagagcgcctcgcttcgggcataaaaaaacccgcgcaatggcgcgggttttttgtttgactgcgtgctggcttaatgctggatgccgctcactcgtctaccgcgcaaagaagatgcgtttagtagtagtagaccgataaagcgaacgatgtgagtcattaaatcagctccagatgaatgcgatatgcttttagagttactggatacaaaaacggatgtcaaccctgacgcaataaaaacgtcccgccagcgtgagttctgcatccgtaaaattagctaattgtgctgcggtggttaaagtaagcgatattaatttctgcttaactaccgacgcttttcatcggttgacatatttcagcataaatttttgcatctaatcaacgaggaaaaaggggacaaaatgcacgcgttgcaaaacctatcctgatgatttgtattgaattatatgttttgcgattttttttgatattgatttggtgaatattattgatcaattaatgttaagaattaatgcattaaatatataaattaattattaaataagcacatttaatccattttgtagatgattgagtattcgcggtagttatgattagattgttttcgcaacaaaaacattatggattattatgctgtggtaaatgactcattccacggcaatggattctgtttttatcagaacccgtatctttatgttttccgaattttactcattttgctttttcttattttatatgcatgataaatcatattcttcaggattatttctctgcattccaataagggaaagggagttaagtgtgacagtggagttaagtatgccagaggtacaaacagatcatccagagacggcggagttaagcaaaccacagctacgcatggtcgatctcaacttattaaccgttttcgatgccgtgatgcaggagcaaaacattactcgtgccgctcatgttctgggaatgagccaacctgcggtcagtaacgctgttgcacgcctgaaggtgatgtttaatgacgagctttttgttcgttatggccgtggtattcaaccgactgctcgcgcatttcaactttttggtagtgttcgtcaggcattgcaactagtacaaaatgaattgcctggtagtggttttgaacccgcgagcagtgaacgtgtatttcatctttgtgtttgcagcccgttagacagcattctgaccagccagatttataatcacattgagcagattgcgccaaatatacatgttatgttcaagtctagtttaaatcagaacactgaacatcagctgcgttatcaggaaacggagtttgtgattagttatgaagacttccatcgtcctgaatttaccagcgtaccattatttaaagatgaaatggtgctggtagccagcaaaaatcatccaacaattaagggcccgttactgaaacatgatgtttataacgaacaacatgcggcggttagcctcgatcgtttcgcgagttttagtcaaccttggtatgacacggtagataagcaagccagtatcgcgtatcagggcatggcaatgatgagcgtacttagcgtggtgagccaaacgcatttggtcgctattgcgccgcgttggctggctgaagagttcgctgaatccttagaattacaggtattaccgctgccgttaaaacaaaacagcagaacctgttatctctcctggcatgaagctgccgggcgcgataaaggccatcagtggatggaagagcaattagtcagtatttgcaaacgctaactgattgcagaataggtcagacatgaatgtctggtttattctgcattttttattgaatgtagaattttattctgaatgtgtgggctctctattttaggattaattaaaaaaatagagaaattgctgtaagttgtgggattcagccgatttattatcaatttaatcctctgtaatggaggattttatcgtttcttttcacctttcctcctgtttattcttattaccccgtgtttatgtctctggctgccaattgcttaagcaagatcggacggttaatgtgttttacacattttttccgtcaaacagtgaggcaggccatggagatgttgtctggagccgagatggtcgtccgaagccttatcgatcagggcgttaaacaagtattcggttatcccggaggcgcagtccttgatatttatgatgcattgcataccgtgggtggtattgatcatgtattagttcgtcatgagcaggcggcggtgcatatggccgatggcctggcgcgcgcgaccggggaagtcggcgtcgtgctggtaacgagcggtccaggggcgaccaatgcgattactggcatcgccaccgcttatatggattccattccattagttgtcctttccgggcaggtagcgaccagcttgataggttacgatgcctttcaggagtgcgacatggtggggattagccgaccggtggttaaacacagttttctggttaagcaaacggaagacattccgcaggtgctgaaaaaggctttctggctggcggcaagtggtcgcccaggaccagtagtcgttgatttaccgaaagatattcttaatccggcgaacaaattaccctatgtctggccggagagcgtcagtatgcgttcttacaatcccactactaccggacataaagggcaaattaagcgtgctctgcaaacgctggtagcggcaaaaaaaccggttgtctacgtaggcggtggggcaatcacggcgggctgccatcagcagttgaaagaaacggtggaggcgttgaatctgcccgttgtttgcagtttgatggggctgggggcgtttccggcaacgcatcgtcaggcactgggcatgctgggaatgcacggtacctacgaagccaatatgacgatgcataacgcggatgtgattttcgccgtcggggtacgatttgatgaccgaacgacgaacaatctggcaaagtactgcccaaatgccactgttctgcatatcgatattgatcctacttccatttctaaaaccgtgactgcggatatcccgattgtgggggatgctcgccaggtcctcgaacaaatgcttgaactcttgagccaagaatccgcccatcaaccactggatgagatccgcgactggtggcagcaaattgaacagtggcgcgctcgtcagtgcctgaaatatgacactcacagtgaaaagattaaaccgcaggcggtgatcgagactctttggcggttgacgaagggagacgcttacgtgacgtccgatgtcgggcagcaccagatgtttgctgcactttattatccattcgacaaaccgcgtcgctggatcaattccggtggcctcggcacgatgggttttggtttacctgcggcactgggcgtcaaaatggcgttgccagaagaaaccgtggtttgcgtcactggcgacggcagtattcagatgaacatccaggaactgtctaccgcgttgcaatacgagttgcccgtactggtggtgaatctcaataaccgctatctggggatggtgaagcagtggcaggacatgatctattccggccgtcatagtcaatcttatatgcaaagcctacccgatttcgtccgtctggcggaagcctatgggcatgtcgggatccagatttctcatccgcatgagctggaaagcaaacttagcgaggcgctggaacaggtgcgcaataatcgcctggtgtttgttgatgttaccgtcgatggcagcgagcacgtctacccgatgcagattcgcgggggcggaatggatgaaatgtggttaagcaaaacggagagaacctgattatgcgccggatattaagtgtcttactcgaaaatgaaagtggcgcgttatcccgcgtgattggccttttttcccagcgtggctacaacattgaaagcctgaccgttgcgccaaccgacgatccgacattaagccgtatgaccatccagaccgtgggcgatgaaaaagtacttgagcagatcgaaaagcaattacacaaactggtcgatgtcttgcgcgtgagtgagttggggcagggcgcgcatgttgagcgggaaatcatgctggtgaaaattcaggccagcggttacgggcgtgacgaagtgaaacgtaatacggaaatattccgtgggcaaattatcgatgtcacacccagcctttataccgttcaattagcaggcaccagcggtaagcttgatgcatttttagcaagcattcgcgatgtggcgaaaattgtggaggttgctcgctctggtgtggtcggacttagccgcggcgataaaataatgcgttgagaatgatctcaatgcgcaatttacagcccaacatgtcacgttgggctttttttgcgaaatcagtgggaacctggaataaaagcagttgccgcagttaattttctgcgcttagatgttaatgaatttaacccataccagtacaatggctatggtttttacattttacgcaaggggcaattgtgaaactggatgaaatcgctcggctggcgggagtgagccggaccactgcaagctatgttattaacggcaaagcgaagcaataccgtgtgagcgacaaaaccgttgaaaaagtcatggctgtggtgcgtgagcacaattaccacccgaacgccgtggcagctgggcttcgtgctggacgcacacgttctattggtcttgtgatccccgatctggagaacaccagctatacccgcatcgctaactatcttgaacgccaggcgcggcaacggggttatcaactgctgattgcctgcagtgaagatcagccagacaacgaaatgcggtgcattgagcaccttttacagcgtcaggttgatgccattattgttagcacgagcttgcctcctgagcatcctttttatcaacgctgggctaacgacccgttcccgattgtcgcgctggaccgcgccctcgatcgtgaacacttcaccagcgtggttggtgccgatcaggatgatgccgaaatgctggcggaagagttacgtaagtttcccgccgagacggtgctttatcttggtgcgctaccggagctttctgtcagcttcctgcgtgaacaaggtttccgtactgcctggaaagatgatccgcgcgaagtgcatttcctgtatgccaacagctatgagcgggaggcggctgcccagttattcgaaaaatggctggaaacgcatccgatgccgcaggcgctgttcacaacgagctttgcgttgttgcaaggagtgatggatgtcacgctgcgtcgcgacggcaaactgccttctgacctggcaattgccacctttggcgataacgaactgctcgacttcttacagtgtccggtgctggcagtggctcaacgtcaccgcgatgtcgcagagcgtgtgctggagattgtcctggcaagcctggacgaaccgcgtaagccaaaacctggtttaacgcgcattaaacgtaatctctatcgccgcggcgtgctcagccgtagctaagccgcgaacaaaaatacgcgccaggtgaatttccctctggcgcgtagagtacgggactggacatcaatatgcttaaagtaaataagactattcctgactattattgataaatgcttttaaacccgcccgttaattaactcaccagctgaaattcacaataattaagtgatatcgacagcgcgtttttgcattattttgttacatgcggcgatgaattgccgatttaacaaacacttttctttgcttttgcgcaaacccgctggcatcaagcgccacacagacgtaacaaggactgttaaccggggaagatatgtcctaaaatgccgctcgcgtcgcaaactgacactttatatttgctgtggaaaatagtgagtcattttaaaacggtgatgacgatgagggattttttcttacagctattcataacgttaatttgcttcgcacgttggacgtaaaataaacaacgctgatattagccgtaaacatcgggttttttacctcggtatgccttgtgactggcttgacaagcttttcctcagctccgtaaactcctttcagtgggaaattgtggggcaaagtgggaataaggggtgaggctggcatgttccggggagcaacgttagtcaatctcgacagcaaagggcgcttaagtgtgcctacccgttatcgggaacagctgcttgagaacgctgccggtcaaatggtttgcaccattgacatttatcacccgtgcctgctgctttaccccctgcctgaatgggaaattatcgagcaaaaattaagccgtctgagcagcatgaacccggttgagcgccgtgtgcagcgcctactgttaggtcatgccagcgaatgtcagatggatggcgcaggtcgattgttaatcgcgccagtactgcggcaacatgccgggctgacaaaagaagtgatgctggttggacagttcaacaagtttgagctgtgggatgaaacaacctggcatcaacaggtcaaggaagatatcgacgcagagcagttggctaccggagacttaagcgagcgactgcaggacttgtctctataaaatgatggaaaactataaacatactacggtgctgctggatgaagccgttaatggcctcaatatccgtcctgatggcatctacattgatgggacttttggtcgcggtggtcacagtcgtctgatcctcagccagcttggcgaagaggggcgtttgctggcgatcgatcgcgacccgcaggctatcgccgttgcgaagactattgatgatccgcgcttctccatcatccacggacctttctccgcgctgggcgaatacgttgccgagcgcgatcttatcggcaagatcgacggcattctcctcgatcttggcgtctctagtccgcaacttgatgatgctgaacgtggcttttcctttatgcgcgatggtccgctggacatgcgtatggacccaacccgtgggcagagtgccgctgaatggctacaaaccgcagaagaagccgatatcgcctgggtattgaaaacctatggtgaagagcgttttgccaaacgcattgcccgcgccattgtcgagcgtaaccgcgaacagccgatgacccgcaccaaagaactggcggaagtcgtggctgctgcaacgccggtgaaagataagtttaaacatcccgcgacccgtaccttccaggcggtgcgcatttgggtaaacagtgaactggaggagatagagcaggcgctaaaaagcagcctcaacgtgctggccccgggtgggcggcttagcatcatcagcttccacagcctggaagaccgtattgtgaaacgttttatgcgtgaaaacagccgcggtccgcaagttccggcagggttaccgatgactgaagagcagctcaaaaaactgggtggccgtcagctgcgagcactaggcaagttaatgccgggcgaagaagaggtggctgagaaccctcgtgcccgtagtagtgttctgcgtattgcagagaggacgaatgcatgatcagcagagtgacagaagctctaagcaaagttaaaggaagcatgggaagccacgagcgccatgcattgcctggtgttatcggtgacgatcttttgcgatttgggaagctgccactctgcctgttcatttgcattattttgacggcggtgactgtggtaaccacggcgcaccatacccgtttactgaccgctcagcgcgaacaactggtgctggagcgagatgctttagacattgaatggcgcaacctgatccttgaagagaatgcgctcggcgaccatagccgggtggaaaggatcgccacggaaaagctgcaaatgcagcatgttgatccgagtcaagaaaatatcgtagtgcaaaaataaggataaacgcgacgcatgaaagcagcggcgaaaacgcagaaaccaaaacgtcaggaagaacatgccaactttatcagttggcgttttgcgttgttatgcggctgtattctcctggcgctggcttttctgctcggacgcgtagcgtggttacaagttatctccccggatatgctggtgaaagagggcgacatgcgttctcttcgcgttcagcaagtttccacctcccgcggcatgattactgaccgttctggtcgcccgttagcggtgagcgtgccggtaaaagcgatttgggctgacccgaaagaagtgcatgacgctggcggtatcagcgtcggtgaccgctggaaggcgctggctaacgcgctcaatattccgctggatcagcttagtgcccgcattaacgccaacccgaaagggcgctttatttatctggcgcgtcaggtgaaccctgacatggcggactacatcaaaaaactgaaactgccggggattcatctgcgtgaagagtctcgccgttactatccgtccggcgaagtgactgctcacctcatcggctttactaacgtcgatagtcaagggattgagggcgttgagaagagtttcgataaatggcttaccgggcagccgggtgagcgcattgtgcgtaaagaccgctatggtcgcgtaattgaagatatttcttctactgacagccaggcagcgcacaacctggcgctgagtattgatgaacgcctgcaggcgctggtttatcgcgaactgaacaacgcggtggcctttaacaaggctgaatctggtagcgccgtgctggtggatgtcaacaccggtgaagtgctggcgatggctaacagcccgagttacaaccctaacaatctgagcggcacgccgaaagaggcgatgcgtaaccgtaccatcaccgacgtgtttgaaccgggcagtacggttaaaccgatggtggtaatgaccgcgttgcaacgtggcgtggtgcgggaaaacagcgtactcaataccattccttatcgaattaacggccacgaaatcaaagacgtggcacgctacagcgaattaaccctgaccggggtattacagaagagcagtaacgtcggtgtttccaagctggcgttagcgatgccgtccagtgcgttagtagatacttacagtcgttttggactgggaaaagcgaccaatttggggttggtcggagaacgcagtggcttatatcctcaaaaacaacggtggtctgacatagagagggccaccttctctttcggctacgggctaatggtaacaccattacagttagcgcgagtctacgcaactatcggcagctacggcatttatcgcccactgagcattaccaaagttgaccccccggttcccggtgaacgtgtcttcccggaatccattgtccgcactgtggtgcatatgatggaaagcgtggcgctaccaggcggcggcggcgtgaaggcggcgattaaaggctatcgtatcgccattaaaaccggtaccgcgaaaaaggtcgggccggacggtcgctacatcaataaatatattgcttataccgcaggcgttgcgcctgcgagtcagccgcgcttcgcgctggttgttgttatcaacgatccgcaggcgggtaaatactacggcggcgccgtttccgcgccggtctttggtgccatcatgggcggcgtattgcgtaccatgaacatcgagccggatgcgctgacaacgggcgataaaaatgaatttgtgattaatcaaggcgaggggacaggtggcagaagctaaagcctgagcgcttcgcgctggttgttgttatcaacgatccgcaggcgggtaaatactacggcggcgccgtttccgcgccggtctttggtgccatcatgggcggcgtattgcgtaccatgaacatcgagccggatgcgctgacaacgggcgataaaaatgaatttgtgattaatcaaggcgaggggacaggtggcagatcgtaatttgcgcgaccttcttgctccgtgggtgccagacgcacctagccgagcactgcgagagatgacactcgacagccgtgtggctgcggcgggcgatctctttgtagctgtagtaggtcatcaggcggacgggcgtcgatatatcccgcaggcgatagcgcaaggtgtggctgccattattgcagaggcgaaagatgaggcgaccgatggtgaaatccgtgaaatgcacggcgtaccggtcatctatctcagccagctcaacgagcgtttatctgcactggcgggccgcttttaccatgaaccctctgacaatttacgtctcgtgggcgtaacgggcaccaacggcaaaaccacgactacccagctgttggcgcagtggagccaactgcttggcgaaatcagcgcggtaatgggcaccgttggtaacggcctgctggggaaagtgatcccgacagaaaatacaaccggtagcgcagtcgatgttcagcatgagctggcggggctggtggatcagggcgcgacgttttgcgcaatggaagtttcctcccacgggctggtacagcaccgtgtggcggcattgaaatttgcggcgagcgtctttaccaacttaagccgcgatcaccttgattatcatggtgatatggaacactacgaagccgcgaaatggctgctttattctgagcatcattgcggtcaggcgattattaacgccgacgatgaagtgggccgccgctggctggcaaaactgccggacgcggttgcggtaagtatggaagatcatattaatccgaactgtcacggacgctggttgaaagcgaccgaagtgaactatcacgacagcggtgcgacgattcgctttagcagtagttggggcgatggcgaaattgaaagccatctgatgggcgcttttaacgtcagcaacctgctgctcgcgctggcgacactgttggcactcggctatccactggctgatctgctgaaaaccgccgcgcgtctgcaaccggtttgcggacgtatggaagtgttcactgcgccaggcaaaccgacggtggtggtggattacgcgcatacgccggatgcactggaaaaagccttacaggcggcgcgtctgcactgtgcgggcaagctgtggtgtgtctttggctgtggtggcgatcgcgataaaggtaagcgtccactgatgggcgcaattgccgaagagtttgctgacgtggcggtggtgacggacgataacccgcgtaccgaagaaccgcgtgccatcatcaacgatattctggcgggaatgttagatgccggacatgccaaagtgatggaaggccgtgctgaagcggtgacttgcgccgttatgcaggctaaagagaatgatgtggtactggtcgcgggcaaaggccatgaagattaccagattgttggcaatcagcgtctggactactccgatcgcgtcacggtggcgcgtctgctgggggtgattgcatgattagcgtaacccttagccaacttaccgacattctcaacggtgaactgcaaggtgcagatatcacccttgatgctgtaaccactgatacccgaaaactgacgccgggctgcctgtttgttgccctgaaaggcgaacgttttgatgcccacgattttgccgaccaggcgaaagctggcggcgcaggcgcactactggttagccgtccgctggacatcgacctgccgcagttaatcgtcaaggatacgcgtctggcgtttggtgaactggctgcatgggttcgccagcaagttccggcgcgcgtggttgctctgacggggtcctccggcaaaacctccgttaaagagatgacggcggcgattttaagccagtgcggcaacacgctttatacggcaggcaatctcaacaacgacatcggtgtaccgatgacgctgttgcgcttaacgccggaatacgattacgcagttattgaacttggcgcgaaccatcagggcgaaatagcctggactgtgagtctgactcgcccggaagctgcgctggtcaacaacctggcagcggcgcatctggaaggttttggcagccttgcgggtgtcgcgaaagcgaaaggtgaaatctttagcggcctgccggaaaacggtatcgccattatgaacgccgacaacaacgactggctgaactggcagagcgtaattggcagtcgcaaagtgtggcgtttcagtcccaatgccgccaacagcgatttcaccgccaccaatatccatgtgaccagccacggtacggaatttaccctacaaaccccaaccggtagcgtcgatgttctgctgccgttgccggggcgtcacaatattgcgaatgcgctggcagccgctgcgctctccatgtccgtgggcgcaacgcttgatgctatcaaagcggggctggcaaatctgaaagctgttccaggccgtctgttccccatccaactggcagaaaaccagttgctgctcgacgactcctacaacgccaatgtcggtagtatgactgcagcagtccaggtactggctgaaatgccgggctaccgcgtgctggtggtgggcgatatggcggaactgggcgctgaaagcgaagcctgccatgtacaggtgggcgaggcggcaaaagctgctggtattgaccgcgtgttaagcgtgggtaaacaaagccatgctatcagcaccgccagcggcgttggcgaacattttgctgataaaactgcgttaattacgcgtcttaaattactgattgctgagcaacaggtaattacgattttagttaagggtagtcgtagtgccgccatggaagaggtagtacgcgctttacaggagaatgggacatgttaatataagctttacaggagaatgggacatgttagtttggctggccgaacatttggtcaaatattattccggctttaacgtcttttcctatctgacgtttcgcgccatcgtcagcctgctgaccgcgctgttcatcagtttgtggatgggcccgcgtatgattgctcatttgcaaaaactttcctttggtcaggtggtgcgtaacgacggtcctgaaagtcacttcagcaagcgcggtacgccgaccatgggcgggattatgatcctgacggcgattgtgatctccgtactgctgtgggcttacccgtccaatccgtacgtctggtgcgtgttggtggtgctggtaggttacggtgttattggctttgttgatgattatcgcaaagtggtgcgtaaagacaccaaagggttgatcgctcgttggaagtatttctggatgagcgtcattgcgctgggtgtcgccttcgccctgtaccttgccggcaaagacacgcccgcaacgcagctggtggtcccattctttaaagatgtgatgccgcagctggggctgttctacattctgctggcttacttcgtcattgtgggtactggcaacgcggtaaacctgaccgatggtctcgacggcctggcaattatgccgaccgtatttgtcgccggtggttttgcgctggtggcgtgggcgaccggcaatatgaactttgccagctacttgcatataccgtatctgcgacacgccggggaactggttattgtctgtaccgcgatagtcggggcaggactgggcttcctgtggtttaacacctatccggcgcaggtctttatgggcgatgtaggtagcctggcgttaggtggtgcgttaggcattatcgccgtactgctacgtcaggaattcctgctggtgattatggggggcgtgttcgtggtagaaacgctttctgtcatcctgcaggtcggctcctttaaactgcgcggacaacgtattttccgcatggcaccgattcatcaccactatgaactgaaaggctggccggaaccgcgcgtcattgtgcgtttctggattattagcctgatgctggttctgattggtctggcaacgctgaaggtacgttaatcatggctgattatcagggtaaaaatgtcgtcattatcggcctgggcctcaccgggctttcctgcgtggactttttcctcgctcgcggtgtgacgccgcgcgttatggatacgcgtatgacaccgcctggcctggataaattacccgaagccgtagaacgccacacgggcagtctgaatgatgaatggctgatggcggcagatctgattgtcgccagtcccggtattgcactggcgcatccatccttaagcgctgccgctgatgccggaatcgaaatcgttggcgatatcgagctgttctgtcgcgaagcacaagcaccgattgtggcgattaccggttctaacggcaaaagcacggtcaccacgctagtgggtgaaatggcgaaagcggcgggggttaacgttggtgtgggtggcaatattggcctgcctgcgttgatgctactggatgatgagtgtgaactgtacgtgctggaactgagcagcttccagctggaaaccacctccagcttacaggcggtagcagcgaccattctgaacgtgactgaagatcatatggatcgctatccgtttggtttacaacagtatcgtgcagcaaaactgcgcatttacgaaaacgcgaaagtttgcgtggttaatgctgatgatgccttaacaatgccgattcgcggtgcggatgaacgctgcgtcagctttggcgtcaacatgggtgactatcacctgaatcatcagcagggcgaaacctggctgcgggttaaaggcgagaaagtgctgaatgtgaaagagatgaaactttccgggcagcataactacaccaatgcgctggcggcgctggcgctggcagatgctgcagggttaccgcgtgccagcagcctgaaagcgttaaccacattcactggtctgccgcatcgctttgaagttgtgctggagcataacggcgtacgttggattaacgatagcaaagcgaccaacgtcggcagtacggaagcggcgctgaatggcctgcacgtagacggcacactgcatttgttgctgggtggcgatggtaaaagcgcggactttagcccactggcgcgttacctgaatggcgataacgtacgtctgtattgtttcggtcgtgacggcgcgcagctggcggcgctacgcccggaagtggcagaacaaaccgaaactatggaacaggcgatgcgcttgctggctccgcgtgttcagccgggcgatatggttctgctctccccagcctgtgccagccttgatcagttcaagaactttgaacaacgaggcaatgagtttgcccgtctggcgaaggagttaggttgatgcgtttatctctccctcgcctgaaaatgccgcgcctgccaggattcagtatcctggtctggatctccacggcgctaaagggctgggtgatgggcagccgggaaaaagataccgacagcctgatcatgtacgatcgcaccttactgtggctgaccttcggcctcgcggcgattggctttatcatggtgaccagcgcgagtatgcccatagggcaacgcttaaccaacgatccgttcttcttcgcgaagcgtgatggtgtctatctgattttggcgtttattctggcgatcattacgctgcgtctgccgatggagttctggcaacgctacagtgccacgatgctgctcggatctatcatcctgctgatgatcgtcctggtagtgggtagcagcgttaaaggggcaagccgttggatcgatctcggtttgctgcgtatccagcctgcggagctgacaaaactgagcctgttttgctatatcgccaactatctggtgcgtaaaggcgacgaagtacgtaataacctgcgcggcttcctgaaaccgatgggcgtgattctggtgttggcagtgttactgctggcacagccagaccttggtacggtggtggtgttgtttgtgactacgctggcgatgttgttcctggcgggagcgaaattgtggcagttcattgccattatcggtatgggcattagtgcggttgtgttgctgatactcgccgaaccgtaccgtatccgccgtgttaccgcattctggaacccgtgggaagatccctttggcagcggctatcagttaacgcaaagcctgatggcgtttggtcgcggcgaactttgggggcaaggtttaggtaacagcgtacaaaaactggagtatctgccggaagcgcacactgactttattttcgccattatcggcgaagaactggggtatgtcggtgtggtgctggcacttttaatggtattcttcgtcgcttttcgcgcgatgagcattggccgtaaagcattagaaattgaccaccgtttttccggttttctcgcctgttctattggcatctggtttagcttccaggcgctggttaacgtaggcgcggcggcggggatgttaccgaccaaaggtctgacattgccgctgatcagttacggtggtagcagcttactgattatgagcacagccatcatgatgctgttgcgtattgattatgaaacgcgtctggagaaagcgcaggcgtttgtacgaggtagtcgatgagtggtcaaggaaagcgattaatggtgatggcaggcggaaccggtggacatgtattcccgggactggcggttgcgcaccatctaatggctcagggttggcaagttcgctggctggggactgccgaccgtatggaagcggacttagtgccaaaacatggcatcgaaattgatttcattcgtatctctggtctgcgtggaaaaggtataaaagcactgatagctgccccgctgcgtatcttcaacgcctggcgtcaggcgcgggcgattatgaaagcgtacaaacctgacgtggtgctcggtatgggaggctacgtgagtggtccaggtggtctggccgcgtggagcttaggcattccggttgtacttcatgaacaaaacggtattgcgggcttaaccaataaatggctggcgaagattgccaccaaagtgatgcaggcgtttccaggtgctttccctaatgcggaagtagtgggtaacccggtgcgtaccgatgtgttggcgctgccgttgccgcagcaacgtttggctggacgtgaaggtccggttcgtgtgctggtagtgggtggttctcagggcgcacgcattcttaaccagacaatgccgcaggttgctgcgaaactgggtgatagtgtcactatctggcatcagagcggcaaaggtagccaacaatccgttgaacaggcgtatgccgaagcggggcaaccgcagcataaagtgacggaatttattgatgatatggcggcggcgtatgcgtgggcggatgtcgtcgtttgccgctccggtgcgttaacggtgagtgaaatcgccgcggcaggactaccggcgttgtttgtgccgtttcaacataaagaccgccagcaatactggaatgcgctaccgctggaaaaagcgggcgcagccaaaattatcgagcagccacagcttagcgtggatgctgtcgccaacaccctggccgggtggagccgagaaaccttattaaccatggcagaacgcgcccgcgctgcatccattccggatgccaccgagcgagtggcaaatgaagtgagccgggttgcccgggcgtaattgtagcgatgccttttgcatcgtatgaatttaagaagttaatggcgtaaagaatgaatacacaacaattggcaaaactgcgttccatcgtgcccgaaatgcgtcgcgttcggcacatacattttgtcggcattggtggtgccggtatgggcggtattgccgaagttctggccaatgaaggttatcagatcagtggttccgatttagcgccaaatccggtcacgcagcagttaatgaatctgggtgcgacgatttatttcaaccatcgcccggaaaacgtacgtgatgccagcgtggtcgttgtttccagcgcgatttctgccgataacccggaaattgtcgccgctcatgaagcgcgtattccggtgatccgtcgtgccgaaatgctggctgagttaatgcgttttcgtcatggcatcgccattgccggaacgcacggcaaaacgacaaccaccgcgatggtttccagcatctacgcagaagcggggctcgacccaaccttcgttaacggcgggctggtaaaagcggcgggggttcatgcgcgtttggggcatggtcggtacctgattgccgaagcagatgagagtgatgcaagcttcctgcatctgcaaccgatggtggcgattgtcaccaatatcgaagccgaccacatggatacctaccagggcgactttgagaatttaaaacagacttttattaattttctgcacaacctgccgttttacggtcgtgcggtgatgtgtgttgatgatccggtgatccgcgaattgttaccgcgagtggggcgtcagaccacgacttacggcttcagcgaagatgccgacgtgcgtgtagaagattatcagcagattggcccgcaggggcactttacgctgctgcgccaggacaaagagccgatgcgcgtcaccctgaatgcgccaggtcgtcataacgcgctgaacgccgcagctgcggttgcggttgctacggaagagggcattgacgacgaggctattttgcgggcgcttgaaagcttccaggggactggtcgccgttttgatttcctcggtgaattcccgctggagccagtgaatggtaaaagcggtacggcaatgctggtcgatgactacggccaccacccgacggaagtggacgccaccattaaagcggcgcgcgcaggctggccggataaaaacctggtaatgctgtttcagccgcaccgttttacccgtacgcgcgacctgtatgatgatttcgccaatgtgctgacgcaggttgataccctgttgatgctggaagtgtatccggctggcgaagcgccaattccgggagcggacagccgtagcctgtgtcgcacaattcgtggacgtgggaaaattgatcccattctggtgccggatccggcgcgggtagccgagatgctggcaccggtattaaccggtaacgacctgattctcgttcagggggctggtaatattggaaaaattgcccgttctttagctgaaatcaaactgaagccgcaaactccggaggaagaacaacatgactgataaaatcgcggtcctgttgggtgggacctccgctgagcgggaagtttctctgaattctggcgcagcggtgttagccggactgcgtgaaggcggtattgacgcgtatcctgtcgacccgaaagaagtcgacgtgacgcaactgaagagcatgggctttcagaaagtgtttatcgcgctacacggtcgcggcggtgaagatggtacgctgcaggggatgctcgagctgatgggcttgccttataccggaagcggagtgatggcatctgcgcttagtatggataaactacgcagcaaacttctatggcaaggtgccggtttaccggtcgcgccgtgggtagcgttaacccgcgcagagtttgaaaaaggcctgagcgataagcagttagcagaaatttctgctctgggtttgccggttatcgttaagccgagccgcgaaggttccagtgtgggaatgagtaaagtagtagcagaaaatgctctacaagatgcattaagattggcatttcagcacgatgaagaagtattgattgaaaaatggctaagtgggccggagttcacggttgcgatactcggtgaagaaattttaccgagtatacgtattcaaccgtccggaaccttctatgattatgaggcgaagtatctctctgatgagacacagtatttctgccccgcaggtctggaagcgagtcaagaggccaatttgcaggcattagtgctgaaagcatggacgacgttaggttgcaaaggatggggacgtattgacgttatgctggacagcgatggacagttttatctgctggaagccaataccagtccgggtatgaccagccacagcctggtgccgatggcggcacgtcaggcaggtatgagcttcagccagttggtagtacgaattctggaactggcggactaatatgagccaggctgctctgaacacgcgaaacagcgaagaagaggtttcttctcgccgcaataatggaacgcgtctggcggggatccttttcctgctgaccgttttaacgacagtgttggtgagcggctgggtcgtgttgggctggatggaagatgcgcaacgcctgccgctcagtaagctggtgttgaccggtgaacgccattacacacgtaatgacgatatccggcagagcatcctggcattgggtgagccgggtacctttatgacccaggatgtcaacatcatccagacgcaaatagaacaacgcctgccgtggattaagcaggtgagcgtcagaaagcagtggcctgatgaattgaagattcatctggttgaatatgtgccgattgcgcggtggaatgatcaacatatggtagacgcggaaggaaataccttcagcgtgccgccagaacgcaccagcaagcaggtgcttccaatgctgtatggcccggaaggcagcgccaatgaagtgttgcagggctatcgcgaaatggggcagatgctggcaaaggacagatttactctgaaggaagcggcgatgaccgcgcggcgttcctggcagttgacgctgaataacgatattaagctcaatcttggccggggcgatacgatgaaacgtttggctcgctttgtagaactttatccggttttacagcagcaggcgcaaaccgatggcaaacggattagctacgttgatttgcgttatgactctggagcggcagtaggctgggcgcccttgccgccagaggaatctactcagcaacaaaatcaggcacaggcagaacaacaatgatcaaggcgacggacagaaaactggtagtaggactggagattggtaccgcgaaggttgccgctttagtaggggaagttctgcccgacggtatggtcaatatcattggcgtgggcagctgcccgagccgtggtatggataaaggcggggtgaacgacctcgaatccgtggtcaagtgcgtacaacgcgccattgaccaggcagaattgatggcagattgtcagatctctagcgtatatctggcgctttctggtaagcacatcagctgccagaatgaaattggtatggtgcctatttctgaagaagaagtgacgcaagaagatgtggaaaacgtcgtccataccgcgaaaagcgtgcgtgtgcgcgatgagcatcgtgtgctgcatgtgatcccgcaagagtatgcgattgactatcaggaagggatcaagaatccggtaggacttagcggcgtgcggatgcaggcaaaagtgcacctgatcacatgtcacaacgatatggcgaaaaacatcgtcaaagcggttgaacgttgtgggctgaaagttgaccaactgatatttgccggactggcaagtagttatagcgtattgacggaagatgaacgtgaactgggtgtctgcgtcgtcgatatcggtggtggtacaatggatatcgccgtttataccggtggggcattgcgccacactaaggtaattccttatgctggcaatgtcgtgaccagtgatatcgcttacgcctttggcacgccgccaagcgacgccgaagcgattaaagttcgccacggttgtgcgctgggttccatcgttggaaaagatgagagcgtggaagtgccgagcgtaggtggtcgtccgccacggagtctgcaacgtcagacactggcagaggtgatcgagccgcgctataccgagctgctcaacctggtcaacgaagagatattgcagttgcaggaaaagcttcgccaacaaggggttaaacatcacctggcggcaggcattgtattaaccggtggcgcagcgcagatcgaaggtcttgcagcctgtgctcagcgcgtgtttcatacgcaagtgcgtatcggcgcgccgctgaacattaccggtttaacggattatgctcaggagccgtattatagcacggcggtgggattgcttcactatgggaaagagagtcatcttaacggtgaagctgaagtagaaaaacgtgttacagcaagtgttggcagctggatcaagcgactcaatagttggctgcgaaaagagttttaatttttatgaggccgacgatgattacggcctcaggcgacaggcacaaatcggagagaaactatgtttgaaccaatggaacttaccaatgacgcggtgattaaagtcatcggcgtcggcggcggcggcggtaatgctgttgaacacatggtgcgcgagcgcattgaaggtgttgaattcttcgcggtaaataccgatgcacaagcgctgcgtaaaacagcggttggacagacgattcaaatcggtagcggtatcaccaaaggactgggcgctggcgctaatccagaagttggccgcaatgcggctgatgaggatcgcgatgcattgcgtgcggcgctggaaggtgcagacatggtctttattgctgcgggtatgggtggtggtaccggtacaggtgcagcaccagtcgtcgctgaagtggcaaaagatttgggtatcctgaccgttgctgtcgtcactaagcctttcaactttgaaggcaagaagcgtatggcattcgcggagcaggggatcactgaactgtccaagcatgtggactctctgatcactatcccgaacgacaaactgctgaaagttctgggccgcggtatctccctgctggatgcgtttggcgcagcgaacgatgtactgaaaggcgctgtgcaaggtatcgctgaactgattactcgtccgggtttgatgaacgtggactttgcagacgtacgcaccgtaatgtctgagatgggctacgcaatgatgggttctggcgtggcgagcggtgaagaccgtgcggaagaagctgctgaaatggctatctcttctccgctgctggaagatatcgacctgtctggcgcgcgcggcgtgctggttaacatcacggcgggcttcgacctgcgtctggatgagttcgaaacggtaggtaacaccatccgtgcatttgcttccgacaacgcgactgtggttatcggtacttctcttgacccggatatgaatgacgagctgcgcgtaaccgttgttgcgacaggtatcggcatggacaaacgtcctgaaatcactctggtgaccaataagcaggttcagcagccagtgatggatcgctaccagcagcatgggatggctccgctgacccaggagcagaagccggttgctaaagtcgtgaatgacaatgcgccgcaaactgcgaaagagccggattatctggatatcccagcattcctgcgtaagcaagctgattaagaattgactggaatttgggtttcgaggctctttgtgctaaactggcccgccgaatgtatagtacacttcggttggataggtaatttggcgagataatacgatgatcaaacaaaggacacttaaacgtatcgttcaggcgacgggtgtcggtttacataccggcaagaaagtcaccctgacgttacgccctgcgccggccaacaccggggtcatctatcgtcgcaccgacttgaatccaccggtagatttcccggccgatgccaaatctgtgcgtgataccatgctctgtacgtgtctggtcaacgagcatgatgtacggattagtaccgtagagcacctcaatgctgctctcgcgggcttgggcatcgataacattgttatcgaagttaacgcgccggaaatcccgatcatggacggcagcgccgctccgtttgtatacctgctgcttgacgccggtatcgacgagttgaactgcgccaaaaaatttgttcgcatcaaagagactgttcgtgtcgaagatggcgataagtgggctgaatttaagccgtacaatggttttagcctggatttcaccatcgattttaaccatccggctattgattccagcaaccagcgctatgcgatgaacttctccgctgatgcgtttatgcgccagatcagccgtgcgcgtacgttcggtttcatgcgtgatatcgaatatctgcagtcccgtggtttgtgcctgggcggcagcttcgattgtgccatcgttgttgacgattatcgcgtactgaacgaagacggcctgcgttttgaagacgaatttgtgcgtcacaaaatgctcgatgcgatcggtgacttgttcatgtgtggtcacaatattattggtgcatttaccgcttataaatccggtcatgcactgaataacaaactgctgcaggctgtcctggcgaaacaggaagcctgggaatatgtgaccttccaggacgacgcagaactgccgttggccttcaaagcgcctagtgctgtactggcataacgacatttatactgtcgtataaaattcgactggcaaatctggcactctctccggccaggtgaaccagtcgtttttttttgaattttataagagctataaaaaacggtgcgaacgctgttttcttaagcacttttccgcacaacttatcttcattcgtgctgtggactgcaggctttaatgataagatttgtgcgctaaatacgtttgaatatgatcgggatggcaataacgtgagtggaatactgacgcgctggcgacagtttggtaaacgctacttctggccgcatctcttattagggatggttgcggcgagtttaggtttgcctgcgctcagcaacgccgccgaaccaaacgcgcccgcaaaagcgacaacccgcaaccacgagcctagtgccaaagttaactttggtcaattggccttgctggaagcgaacacacgccgcccgaatagcaactattccgttgattactggcatcaacatgccattcgcacggtaatccgtcatctttctttcgcaatggcaccgcaaacactgcccgttgctgaagaatctttgcctcttcaggcgcaacatcttgcattactggatacgctcagcgcgctgctgacccaggaaggcacgccgtctgaaaagggttatcgcattgattatgcgcattttaccccacaagcaaaattcagcacgcccgtctggataagccaggcgcaaggcatccgtgctggccctcaacgcctcacctaacaacaataaacctttacttcattttattaactccgcaacgcggggcgtttgagattttattatgctaatcaaattgttaactaaagttttcggtagtcgtaacgatcgcaccctgcgccggatgcgcaaagtggtcaacatcatcaatgccatggaaccggagatggaaaaactctccgacgaagaactgaaagggaaaaccgcagagtttcgtgcacgtctggaaaaaggcgaagtgctggaaaatctgatcccggaagctttcgccgtggtacgtgaggcaagtaagcgcgtctttggtatgcgtcacttcgacgttcagttactcggcggtatggttcttaacgaacgctgcatcgccgaaatgcgtaccggtgaaggaaaaaccctgaccgcaacgctgcctgcttacctgaacgcactaaccggtaaaggcgtgcacgtagttaccgtcaacgactacctggcgcaacgtgacgccgaaaacaaccgtccgctgtttgaattccttggcctgactgtcggtatcaacctgccgggcatgccagcaccggcaaagcgcgaagcttacgcagctgacatcacttacggtacgaacaacgaatacggctttgactacctgcgcgacaacatggcgttcagccctgaagaacgtgtacagcgtaaactgcactatgcgctggtggacgaagtggactccatcctgatcgatgaagcgcgtacaccgctgatcatttccggcccggcagaagacagcagcgaaatgtataaacgcgtgaataaaattattccgcacctgatccgtcaggaaaaagaagactccgaaaccttccagggcgaaggccacttcagcgtggacgaaaaatctcgccaggtgaacctgaccgaacgtggtctggtgctgattgaagaactgctggtgaaagagggcatcatggatgaaggggagtctctgtactctccggccaacatcatgctgatgcaccacgtaacggcggcgctgcgcgctcatgcgctgtttacccgtgacgtcgactacatcgttaaagatggtgaagttatcatcgttgacgaacacaccggtcgtaccatgcagggccgtcgctggtccgatggtctgcaccaggctgtggaagcgaaagaaggtgtgcagatccagaacgaaaaccaaacgctggctagcatcaccttccagaactacttccgtctgtatgaaaaactggcggggatgaccggtactgctgataccgaagctttcgaatttagcagtatctacaagctggataccgtcgttgttccgaccaaccgtccaatgattcgtaaagatctgccggacctggtctacatgactgaagcggaaaaaattcaggcgatcattgaagatatcaaagaacgtactgcgaaaggccagccggtgctggtgggtactatctccatcgaaaaaagcgagctggtgagtaacgaactgaccaaagccggtattaagcacaacgtcctgaacgccaaattccacgccaacgaagcggcgattgttgctcaggcaggttatccggctgcggtgactatcgcgaccaatatggcgggtcgtggtacagatattgtgctcggtggtagctggcaggcagaagttgccgcgctggaaaatccgaccgcagagcaaattgaaaaaattaaagccgactggcaggtacgtcacgatgcggtactggaagcaggtggcctgcatatcatcggtaccgagcgtcacgaatcccgtcgtatcgataaccagttgcgcggtcgttctggtcgtcagggggatgctggttcttcccgtttctacctgagcatggaagatgcgctgatgcgtatttttgcttccgaccgagtatccggcatgatgcgtaaactgggtatgaagccaggcgaagccattgaacacccgtgggtgactaaagcgattgccaacgcccagcgtaaagttgaaagccgtaacttcgacattcgtaagcaactgctggaatatgatgacgtggctaacgatcagcgtcgcgccatttactcccagcgtaacgaactgttggatgtcagcgatgtgagcgaaaccattaacagcattcgtgaagatgtgttcaaagcgaccattgatgcctacattccaccacagagcctggaagaaatgtgggatattccggggctgcaggaacgtctgaagaacgatttcgacctcgatttgccaattgccgagtggctggataaagaaccagaactgcatgaagagacgctgcgtgagcgcattctggcgcagtccatcgaagtgtatcagcgtaaagaagaagtggttggtgctgagatgatgcgtcacttcgagaaaggcgtcatgctgcaaacgcttgactccctgtggaaagagcacctggcagcgatggactatctgcgtcagggtatccacctgcgtggctacgcacagaaagatccgaagcaggaatacaaacgtgaaagcttctccatgtttgcagcgatgctggagagcttgaaatatgaagttatcagtacgctgagcaaagttcaggtacgtatgcctgaagaggttgaggagctggaacaacagcgtcgtatggaagccgagcgtttagcgcaaatgcagcagcttagccatcaggatgacgactctgcagccgcagctgcactggcggcgcaaaccggagagcgcaaagtaggacgtaacgatccttgcccgtgcggttctggtaaaaaatacaagcagtgccatggccgcctgcaataaaagctaactgttgaagtaaaaggcgcaggattctgcgccttttttataggtttaagacaatgaaaaagctgcaaattgcggtaggtattattcgcaacgagaacaatgaaatctttataacgcgtcgcgcagcagatgcgcacatggcgaataaactggagtttcccggcggtaaaattgaaatgggtgaaacgccggaacaggcggtggtgcgtgaacttcaggaagaagtcgggattaccccccaacattttagcctatttgaaaaactggaatatgaattcccggacaggcatataacactgtggttttggctggtcgaacgctgggaaggggagccgtggggtaaagaagggcaacccggtgagtggatgagcctggtcggtcttaatgccgatgattttccgccagccaatgaaccggtaattgcgaagcttaaacgtctgtaagtcagataaggcgttttcgccgcatccgacattcgcacacgatgcctgatgcgacgctggcgcgtcttatcaggcctaaagggatttctaactcattgataaatttgtttttgtaggtcggataaggcgttcacgccgcatccgacatttgcacaagatgcctgatgcgacgctgtccgcgtcttatcaggcctacgtgcggcatcagacaaatgtcactgctttggttcttcgctccagtcatcgctttcggaaagatcgccactgctggggattcgtttttcttcagcagcccattctccgaggtcgatcagctgacaacgtttggagcaaaatggccgaaacgggctgatttcaccccacaccaccgttttcccgcaggttgggcaattcaccgtaatagtttcactcatttttactccttagcaacaggccagttcgaaatccagacgttccggtacctgtccgttttcagtgtccagcggcataaaacgaatggcaaaacggctcttatgtccggaaatttgcggataaagctgactatcgaggctcagattcaggcgcagcaagtcggcatcgccaccgttatcctgataaaaaccattcaggctggtttgtttacggaagggggcgctctggcgaattaaatccagcaccatggtaagtgcctgggtgagcgggttcaggctggcaatccaggtttctacctggctgtcgcgctgcgcctggggtagatgcagccaaatgtgcaatgtaggtaaatcaaagctgcaacagccgcctgggatgctcagtcgctgacgcaccagagcaatcaaacgatcttcacgcagaaattgcccgatacgcggcgcggaaattaatacgctccccgccgcttttaactgctgaattaatgcttcaatacggctctggtccacgccaggcacgccaatccaggtctggagtttacgttgctgccggtcaagttctttcaacagctcagtgcggacttcgccgcgctcgaaaacatccagtaattcactgacattacggaagaaatgcagcgcgccagcgtggtcaacgatgggtaaattaacggtgagttgctgaatcaaaaactcaatgcgcagccatgtacgcattttttcatttagtggatgttcaaaaaggacctgggtctgcattacggtttttcctgactgacaaactggctcgcaagctgcaaatagtgtgcgtgcaggcgggcaacatcgcttgcgatagcatccggtgcgccgttattatcaatgacgtcatctgccacggcaaggcgggcttcgcgcgttgcctgagcagcaaggatttgttcgacatgctcgcgagttacatcatcgcgctgcatggtgcgcttaagttgcgtttctgggctgacatccaccacaagcactcgattcgcttttttatacagactgttttctaccagcaatggcacaacccacagtacatagggggaagtagcttgctggatctggtgttgcgtctcttgctgaatcagcggatgcagcagggcgttaagccagtttttctcttccgggttggcgaagatccgctcgcgcaaggcccggcgctgcaatgttccatcagcagcaatcatgttagcgccaaagtgatcagcaatggcatgtagcgcaggtgcacctggttcaaccacctgacgcgcaataatatcggcatcaatgacgttaattccgagatcagcaaacgcattggcaacggtactcttgccactgccaatgcctcccgttaaggcaactatatacctcataatttatattcccgggaattcatcatgattatcaaaacgttaaaaatgagtgcacgaaagcgaaattgatgaaacgttcgctcactatttaccaggtaaatttatgggattgtagcgtaaaaaaagacaatttcgcagtcttgcgccgcattgattagtgcgtatgatagcgtcactggagttgcgctcttacccttatagccattaaccccaggaatccgcacatgcgtattgaagaagatctgaagttaggttttaaagacgttctcatccgccctaaacgctccactcttaaaagccgttccgatgttgaactggaacgtcaattcaccttcaaacatagtggtcagagctggtccggcgtgccgattatcgccgcaaatatggacaccgtaggcacattttctatggcctctgcgctggcttcttttgatattttgactgctgtgcataaacactattctgtcgaagagtggcaagcgtttatcaacaattcttccgctgatgtgctgaaacatgtgatggtttctaccggtacgtctgatgcggatttcgaaaaaactaaacagattctcgacctgaacccggcattaaacttcgtttgtattgacgtggcgaatggttattccgaacacttcgtgcagttcgttgcgaaagcgcgtgaagcgtggccgaccaaaaccatttgtgctggtaacgtagtgactggtgaaatgtgtgaggagcttatcctcagtggtgccgatatcgttaaagttggcattggcccaggttctgtttgtacaactcgcgtcaaaacaggcgtcggttatccgcaactttctgcggtaatcgaatgtgccgatgctgcgcacggtctgggcggaatgatcgtcagcgatggtggctgcaccacgccgggcgatgtggcgaaagcctttggcggcggtgccgatttcgtcatgcttggcggcatgctggcgggccacgaagagagcggcggtcgcatcgttgaggagaacggcgagaaatttatgctgttctacggcatgagctccgagtctgcgatgaaacgtcacgttggcggcgttgcggaatatcgcgcagcagaaggtaaaaccgttaagctgccgctgcgaggcccggttgaaaataccgcgcgagatattttgggcggcctgcgtagtgcttgtacatacgttggggctagtcgcctgaaagagctgaccaagcgcaccacgtttattcgtgtgcaggaacaagaaaaccgcatcttcaacaacctgtaatctcccaacgctggcgtggagcaacacgccagcgttatcccatcccactcatcgcatcgcctaaatggaaaattggcagatacattgccaccaccagcgtaccaataattcctcccgttatgatcagcaacgccggttccagtaaggctgcgaggttatccgccagcgccattgtgttttcccgatgatgatgggcgaggttgtctaacatgagatccagagagccggatgcctctcctgttctcactaattgcaaacagagcgggctaaactcaccggtattttttagcgccagccagatgggttgaccgttactgatatcgtgctggatttgtgtcagaagttgcacccagtacgggcagcgcattgtttctctgacgctctctacgccctgtaaaaaagtaatgcctgcactttgtgtcagcgccagaatcgtaaagatctgcgtgagtttttgtccccgcatcagactacccataatcgggatgcgtaacagcaatttctgccgcactataagccaggtcggtcggcgcatcagcaacttattggctatcgccagcagaaagccgaacaacaccagcagccagctccattcgccactaaagtctgccagcgtcatgatcccctgcgttagtgccggtagtggggtgttgaaggtcttatagatagcggcaaactccggcagaacaaaatgcagcattgccacaaccaccatgattgccatcgctaaaatgatgatgggataacgtaacgcacttttcactttgtcggtcaactgacgctgggctttttgctgacgcgccagttcaaagcagcattcatccagcttaccggtcagttcacccgtgcggatcatcgcctgatagagcggcggaaatacctcactccagggtaataaggcattggaaaaagcaatgccctgttcgagatcgtgcgccaggctttgcagcaacgcttgccattgcttactgggatgctgttccgccagcagagccagcccttcagaaagcgttaaccctgctttgagtagcgtcgccagttgatgaatgacttccgcgcttttatctcctcgccactgcgcagaattgatggcgattcgcttcaggcttagtggggtaaccatctgttgctgtagtgccataagcagtaaagtacggctctctgcccatagcatcccatcttgcgcattgccgtcgccggttatgccatgccagcgccagagttgcttactcgccatgcggcatccccagtacgcggattaactcttcaaaggtggttaagccttgctctacggccaggcagccgttttcaaaaagcgtacgcatacccgcctgtcgtgcgtgcgtttccaggctttcaacgtcggtattagcggaaataagctgacgaatgaccggcgttatgggcagaacttcaaataaggccgtacgaccataaaaaccgtggtagcaatgtacacaaccgggtgcctgccagtggggcagcgggcttggccatacattgtctggaatgtggatgggctccccttgctgccggcgacaatgtgggcaaagtttgcgtaccagacgctgggctattaccagcgtaagcgcgctacttagcatccagcgggcgacccccatttgctgtaaacgtaccagcgtttcgcaggtggaattagtgtgtagggtagacaacaccaggtgaccagtttgcgccgctttaatagcgatctctgctgtttcgccatcgcggatctctccgatcatgatgacgtcaggatcctggcgcaataacgcacgcaaaacgccctgaaaggtgagtccggcacgcggatggatttgcgtctggtttagtccggctatggggatctcaactggatcttcgacgctacaaatattaatgtcagcggtattcagcttttgcagggcactataaagcgtgaccgttttgccgctgccggtagggccagttaccagcaccagtccctgtggttgttgcaaggcatgagcaaagtccgccagttgtaacggctgcattccaagcgtgttgacatccagtgcctgacccacctgctgtaacaaccttaataccaccttttcaccaccccgacatggtaaggtcgcaatacgaaaactgacggcgtttcctgccagttcgacagtgaattgcccgtcctgcggcaggcgatgttccgcaatatccaggtttcccagcacttttaatctggcggttaatgcgactccggcatccggactaacatccggtaaaggatgcaatacgccgtcgatacgcaagcggatgcggtaggcattgtccgctggttcgatatgaatatcagacgcgcgttgttccagcgcagattgtaacgttcgagttagcaactctgctttgggctgatgcttctcctgaacagctacgggcaatgtctgttgtgtgcgactggcgtgaccttccatttgttggcgcgtccagcaggtgatctcaatacgtttggtggtagcgaaatgcaatgcgtccagtagctcatggctaggtgcatcgactaccgcaacatgaaccacctcttcgctggcatccagcaagactccatgataacgcagacacagggcagtgagctgtggaatattcattgccgctccttagttggcgtcatcaaagcggaagacatcttcgcaggcttgctgcaatgcgctgtcactttgaatattgcagttgcgcgtccagccggtgacgccgtttgcgttatcccaacccggtgtcatgacgacgcttagcccattgagactttcttgcccggtcaggctcaccacgccctttgccacactcatggcactaacatagcgggtggtggtagggctgggaatgccattgctgccaccgtcgcaggtatctaatccaccatgttccagcgcgcacaactctacggcggtacggtaaggcacaaaggtttgtagcatgtcggtgagtgcggctttgcgcaggtagttttgataagcgggaataccaatggcgcttaaaatggcaatgatgccaataaccaccatcagttcgataagtgtaaaaccgcgttgcttgtccatctgtttcgctccttgatttggttggcgctactttggcaaacgccatcagcacaggcgaggggcaaaaaacgaaacgggaaagcagattccgaggttttttatttcgttgcagcgaaagacaagaaatttgcgaggcgttacgaagaaagttggggaaggggagattatccgcccgcgatggagcggataaatctgtcaactattagcgaaaacgcatactaaggtcgagtgcttgtacgtgtttagttagcgcaccgacggagataaagtccacgcccgtttcggcaaattcacgcagtgttttgtcagtgacgttgccagacacttccagtagcgccttgccgttggtgcgtttgacggcttcgcgcatctgttctgtttcgaagttatccagcatgatgatatcggctcctgctttcagggcttcatcaagttcttccagattctctacttcgacttctactggcgcatccgggtgcagccaggacgctttttcgaccgcctggcgcacactgccggaggcaataatatggttttctttgatcaggaaggcatcagaaagccccagacggtgattcgctccgccgccgcaaagtaccgcgtatttcagagcactacgcaggccgggtaaggttttgcgcgtatccaacaactgcgtgttggtgccttccagcaattcgacatagtggcgtaccttactggcaactccactaagggtttgcacaaaattaagcgcagtgcgttcgcccgttaacagcacgcgggatgggccttcaagttcgaacaaggattgattggcattgatgacatcgccgtcatccacatgccagattatggtgacatcgtcgcctgccagttgaataaacacctcttcaacccagcgtttgccgcaaaagacgccattctcgcgggtgatcaccgtggcatgagagcgagaattttccggtaaaagttttgccgtaatatcattgttggcatcgactgttccgcctaaatcttcccgcagcgcctgggccaccgcgccggggatatcgagattaatgcgttccagcagctcgtcacgtcgggtgtcagggttatagcggcgaggcggcatgttaaaactccagatagctaacgaatcataaggtagaaacatgctactctgaaccgggtattagcaccacatataaggagatcctgcatgttgttagaacaggggtggctggttggcgcgcgccgcgttcccagtccacattacgattgccgcccggatgacgaaacacccaccctgctggtggtgcacaatattagcctgccgccaggcgagtttggcggtccgtggatcgacgcattattcactggaactattgatccgcaggcacatcctttctttgctgagatcgcccatttgcgcgtctccgctcactgtttgattcgccgtgatggtgaaatagtccagtatgttcctttcgataaacgtgcatggcatgcgggagcctctcagtatcaggggcgcgaacgctgcaatgatttttctattgggattgagcttgaaggcaccgatacgctggcgtataccgatgcgcagtatcaacagcttgcggcggttacgcgggcactgattgattgctatccggatatcgctaaaaacatgacgggccattgtgatattgcgccggatcggaaaaccgatcccggtcctgcatttgattgggcacggtttcgtgtgctggtcagcaaggagacaacatgacgctatttacaaccttactggtgttaattttcgagcgcctgtttaagttgggcgagcactggcagcttgatcatcgtcttgaagcgttctttcggcgggtgaaacatttttctctcgggcgcacgttaggcatgaccattattgcgatgggcgtgacttttttactgttacgcgcattgcagggagtattgttcaacgttcccacgctactggtgtggctgctgattggtttgctgtgtattggcgcaggtaaagttcgtcttcattatcatgcttatctgacagctgctagtcgtaatgatagccatgcccgtgccacgatggctggcgaactcaccatgattcacggcgtcccggcaggctgcgacgaacgtgagtatttgcgtgagctgcaaaatgcattgctgtggattaactttcgtttttatcttgcaccgctgttctggctgattgtggggggaacctggggacccgttacgctgatggggtatgcgtttttgcgtgcatggcaatactggctggcgcgatatcagacgccgcatcatcgtttacagtccggcattgatgccgtgcttcatgtactggattgggtgccggttcgtcttgcgggtgtggtatatgccttgatcggtcatggtgagaaagcgttaccggcctggtttgctagcctgggtgatttccatactagccagtatcaggtgttaacgcgtctggcgcagttctctctggcgcgtgaaccgcatgtcgataaggtggagacgccgaaggcagcggttagtatggcgaagaaaaccagcttcgtggtcgtggtggtgattgcactactgacgatttacggggcgttggtgtaaagattattgccctcaccctgtacgggtgagggcgtagagagattaatgcgcttttacggctttggcggttttctctttaaacagatagccgatacctaacacgatcagccataccgggatcaggtatacgctaatcgccattcctggggtcatcagcataatcaccagtaccgccgccataaacagcaggcagatccagttacccagcggataaagcagagcagggaagcgagttaccacgccttgttcctgcttggcgcgacggaatttcatatgcgccaggctaatcatcgcccagttgattaccagtgcagataccaccagcgccattaacagtccgaaagcggactctggggcaaggtagttaatcagtacgcacaacgccgttaccagtgcagacaccagaatggtatttactggtacaccacgtttatcgacagacgccagcgcttttggcgcattaccctgttgtgccagaccaaacagcatacggctgttgcaatatacgcagctgttgtacacggagagcgccgcagtcagtaccacgatgttcagcgcattcgccacaaaggtatcgcctaactcgtggaagatcagcacaaacggactggtatcggcggtaacgcgggtccacggcatcagactgagcagaacggctaagctaccaatatagaaaatcaggatgcggtagataacctggttagttgctttcggtatactttgctccgggttatcagcttctgctgcggtgatccccaccagttccagaccaccgaagctgaacatgataatcgccatcatcatcaccagcccggtgaagccgtgcggcaggaaaccaccctgatcccacaggttgctaacggtcgcctgcgggccgccgttgccactgaatagcagccagccgccgaagatgatcatcgctaccaccgcgataactttgataatggcaaaccagaactccatctcgccaaacactttaacgttggtcaggttgatggcgttaatcaccacaaagaatacggcggcagaaacccaggtggggatttccggataccagaactgaatgtatttacccacggcagtcagctcagccatggcaactaaaacgtacagtacccagtagttccagccagaggcgaaaccggcaaaactgccccagtatttataagcaaagtggctaaaggagcctgcgacaggttcttcgaccaccatttcacccagctgacgcatgatcagaaaggcgataaaaccagcaatggcgtaacccaggataatccctggccctgcggactgtattacggaggcgctacccaggaataacccggtccctatcgcgccacccagcgcgataagctgaatatggcggtttttaaggccgcgctttagctgctcgccgtgctgttgaccttccatcatgaaacctcgtgcggtggttgtttttttgatctacgcagtgatgcgtgtgtaagtttgcaattccgtttgttgtattaatttgtttacatcaaagaagtttgaattgttacaaaaagacttccgtcagatcaagaataatggtatgcggcagcgaatgcacccgctttatgcatggttgaagatgagttgcttaaaaagaaaccgtttgtaaagctcagcctcaacccctctcaatatgtagaatgaatttaaattcgttttaattgaattaaaaatcacaaaattggtaagtgaatcggttcaattcggatttttatagtttaataatcgttaaaaaactcctttcctacgtaaagtctacatttgtgcatagttacaactttgaaacgttatatatgtcaagttgttaaaatgtgcacagtttcatgatttcaatcaaaacctgtatggacataaggtgaatactttgttactttagcgtcacagacatgaaattggtaagaccaattgacttcggcaagtggcttaagacaggaactcatggcctacagcaaaatccgccaaccaaaactctccgatgtgattgagcagcaactggagtttttgatcctcgaaggcactctccgcccgggcgaaaaactcccaccggaacgcgaactggcaaaacagtttgacgtctcccgtccctccttgcgtgaggcgattcaacgtctcgaagcgaagggcttgttgcttcgtcgccagggtggcggcacttttgtccagagcagcctatggcaaagcttcagcgatccgctggtggagctgctctccgaccatcctgagagtcagtatgacttgctcgaaacacgacacgccctggaaggtatcgccgcttattacgccgcgctgcgtagtaccgatgaagacaaggaacgcatccgtgaactccaccacgccatagagctggcgcagcagtctggcgatctggacgcggaaagtaacgccgtactccagtatcagattgccgtcaccgaagcggcccacaatgtggttctgcttcatctgctaaggtgtatggagccgatgttggcccagaatgtccgccagaacttcgaattgctctatagccgtcgcgagatgctgccgctggtgagtagtcaccgcacccgcatatttgaagcgattatggccggtaagccggaagaagcgcgcgaagcaagccatcgccatctggcctttatcgaagaaattttgctcgacagaagtcgtgaagagagccgccgtgagcgttctctgcgtcgtctggagcaacgaaagaattaatgatttttctggtaaaaattatccagaagatgttgtaaatcaagcgcatataaaagcgcggcaactaaacgtagaacctgtcttattgagctttccggcgagagttcaatgggacaggttccagaaaactcaacgttattagatagataaggaataacccatgagtgaacgtttcccaaatgacgtggatccgatcgaaactcgcgactggctccaggcgatcgaaagcgtcatccgtgaagaaggtgttgagcgtgctcagtatctgatcgaccaactgcttgctgaagcccgcaaaggcggtgtaaacgtagccgcaggcacaggtatcagcaactacatcaacaccatccccgttgaagaacaaccggagtatccgggtaatctggaactggaacgccgtattcgtagtgctatccgctggaacgccatcatgacggtgctgcgtgcgagcaaaaaagacctcgaactgggcggccatatggcgtccttccagtcttccgcaaccatttatgatgtgtgctttaaccacttcttccgtgcacgcaacgagcaggatggcggcgacctggtttacttccagggccacatctccccgggcgtgtacgctcgtgctttcctggaaggtcgtctgactcaggagcagctggataacttccgtcaggaagttcacggcaatggcctctcttcctatccgcacccgaaactgatgccggaattctggcagttcccgaccgtatctatgggtctgggtccgattggtgctatttaccaggctaaattcctgaaatatctggaacaccgtggcctgaaagatacctctaaacaaaccgtttacgcgttcctcggtgacggtgaaatggacgaaccggaatccaaaggtgcgatcaccatcgctacccgtgaaaaactggataacctggtcttcgttatcaactgtaacctgcagcgtcttgacggcccggtcaccggtaacggcaagatcatcaacgaactggaaggcatcttcgaaggtgctggctggaacgtgatcaaagtgatgtggggtagccgttgggatgaactgctgcgtaaggataccagcggtaaactgatccagctgatgaacgaaaccgttgacggcgactaccagaccttcaaaagcaaagatggtgcgtacgttcgtgaacacttcttcggtaaatatcctgaaaccgcagcactggttgcagactggactgacgagcagatctgggcactgaaccgtggtggtcacgatccgaagaaaatctacgctgcattcaagaaagcgcaggaaaccaaaggcaaagcgacagtaatccttgctcataccattaaaggttacggcatgggcgacgcggctgaaggtaaaaacatcgcgcaccaggttaagaaaatgaacatggacggtgtgcgtcatatccgcgaccgtttcaatgtgccggtgtctgatgcagatatcgaaaaactgccgtacatcaccttcccggaaggttctgaagagcatacctatctgcacgctcagcgtcagaaactgcacggttatctgccaagccgtcagccgaacttcaccgagaagcttgagctgccgagcctgcaagacttcggcgcgctgttggaagagcagagcaaagagatctctaccactatcgctttcgttcgtgctctgaacgtgatgctgaagaacaagagcatcaaagatcgtctggtaccgatcatcgccgacgaagcgcgtactttcggtatggaaggtctgttccgtcagattggtatttacagcccgaacggtcagcagtacaccccgcaggaccgcgagcaggttgcttactataaagaagacgagaaaggtcagattctgcaggaagggatcaacgagctgggcgcaggttgttcctggctggcagcggcgacctcttacagcaccaacaatctgccgatgatcccgttctacatctattacagcatgttcggcttccagcgtattggcgatctgtgctgggcggctggcgaccagcaagcgcgtggcttcctgatcggcggtacttccggtcgtaccaccctgaacggcgaaggtctgcagcacgaagatggtcacagccacattcagagcctgactatcccgaactgtatctcttacgacccggcttacgcttacgaagttgctgtcatcatgcatgacggtctggagcgtatgtacggtgaaaaacaagagaacgtttactactacatcactacgctgaacgaaaactaccacatgccggcaatgccggaaggtgctgaggaaggtatccgtaaaggtatctacaaactcgaaactattgaaggtagcaaaggtaaagttcagctgctcggctccggttctatcctgcgtcacgtccgtgaagcagctgagatcctggcgaaagattacggcgtaggttctgacgtttatagcgtgacctccttcaccgagctggcgcgtgatggtcaggattgtgaacgctggaacatgctgcacccgctggaaactccgcgcgttccgtatatcgctcaggtgatgaacgacgctccggcagtggcatctaccgactatatgaaactgttcgctgagcaggtccgtacttacgtaccggctgacgactaccgcgtactgggtactgatggcttcggtcgttccgacagccgtgagaacctgcgtcaccacttcgaagttgatgcttcttatgtcgtggttgcggcgctgggcgaactggctaaacgtggcgaaatcgataagaaagtggttgctgacgcaatcgccaaattcaacatcgatgcagataaagttaacccgcgtctggcgtaagaggtaaaagaataatggctatcgaaatcaaagtaccggacatcggggctgatgaagttgaaatcaccgagatcctggtcaaagtgggcgacaaagttgaagccgaacagagcctgatcaccgtagaaggcgacaaagcctctatggaagttccgtctccgcaggcgggtatcgttaaagagatcaaagtctctgttggcgataaaacccagaccggcgcactgattatgattttcgattccgccgacggtgcagcagacgctgcacctgctcaggcagaagagaagaaagaagcagctccggcagcagcaccagcggctgcggcggcaaaagacgttaacgttccggatatcggcagcgacgaagttgaagtgaccgaaatcctggtgaaagttggcgataaagttgaagctgaacagagcctgatcaccgtagaaggcgacaaggcttctatggaagttccggctccgtttgctggcaccgtgaaagagatcaaagtgaacgtgggtgacaaagtgtctaccggcagcctgattatggtcttcgaagtcgcgggtgaagcaggcgcggcagctccggccgctaaacaggaagcagctccggcagcggcccctgcaccagcggctggcgtgaaagaagttaacgttccggatatcggcggtgacgaagttgaagtgactgaagtgatggtgaaagtgggcgacaaagttgccgctgaacagagtctgatcaccgtagaaggcgacaaagcttctatggaagttccggcgccgtttgcaggcgtcgtgaaggaactgaaagtcaacgttggcgataaagtgaaaactggcagcctgattatgatcttcgaagttgaaggcgcagcgcctgcggcagctcctgcgaaacaggaagcggcagcgccggcaccggcagcaaaagctgaagccccggcagcagcaccagctgcgaaagcggaaggcaaatctgaatttgctgaaaacgacgcttatgttcacgcgactccgctgatccgccgtctggcacgcgagtttggtgttaaccttgcgaaagtgaagggcactggccgtaaaggtcgtatcctgcgcgaagacgttcaggcttacgtgaaagaagctatcaaacgtgcagaagcagctccggcagcgactggcggtggtatccctggcatgctgccgtggccgaaggtggacttcagcaagtttggtgaaatcgaagaagtggaactgggccgcatccagaaaatctctggtgcgaacctgagccgtaactgggtaatgatcccgcatgttactcacttcgacaaaaccgatatcaccgagttggaagcgttccgtaaacagcagaacgaagaagcggcgaaacgtaagctggatgtgaagatcaccccggttgtcttcatcatgaaagccgttgctgcagctcttgagcagatgcctcgcttcaatagtagcctgagcgaagacggtcagcgtctgaccctgaagaaatacatcaacatcggtgtggcggtggataccccgaacggtctggttgttccggtattcaaagacgtcaacaagaaaggcatcatcgagctgtctcgcgagctgatgactatttctaagaaagcgcgtgacggtaagctgactgcgggcgaaatgcagggcggttgcttcaccatctccagcatcggcggcctgggtactacccacttcgcgccgattgtgaacgcgccggaagtggctatcctcggcgtttccaagtccgcgatggagccggtgtggaatggtaaagagttcgtgccgcgtctgatgctgccgatttctctctccttcgaccaccgcgtgatcgacggtgctgatggtgcccgtttcattaccatcattaacaacacgctgtctgacattcgccgtctggtgatgtaagtaaaagagccggcccaacggccggcttttttctggtaatctcatgaatgtattgaggttattagcgaatagacaaatcggttgccgtttgttgtttaaaaattgttaacaattttgtaaaataccgacggatagaacgacccggtggtggttagggtattacttcacataccctatggatttctgggtgcagcaaggtagcaagcgccagaatccccaggagcttacataagtaagtgactggggtgagggcgtgaagctaacgccgctgcggcctgaaagacgacgggtatgaccgccggagataaatatatagaggtcatgatgagtactgaaatcaaaactcaggtcgtggtacttggggcaggccccgcaggttactccgctgccttccgttgcgctgatttaggtctggaaaccgtaatcgtagaacgttacaacacccttggcggtgtttgcctgaacgtcggctgtatcccttctaaagcactgctgcacgtagcaaaagttatcgaagaagccaaagcgctggctgaacacggtatcgtcttcggcgaaccgaaaaccgatatcgacaagattcgtacctggaaagagaaagtgatcaatcagctgaccggtggtctggctggtatggcgaaaggccgcaaagtcaaagtggtcaacggtctgggtaaattcaccggggctaacaccctggaagttgaaggtgagaacggcaaaaccgtgatcaacttcgacaacgcgatcattgcagcgggttctcgcccgatccaactgccgtttattccgcatgaagatccgcgtatctgggactccactgacgcgctggaactgaaagaagtaccagaacgcctgctggtaatgggtggcggtatcatcggtctggaaatgggcaccgtttaccacgcgctgggtagtcagattgacgtggttgaaatgttcgaccaggttatcccggcagctgacaaagacatcgttaaagtcttcaccaagcgtatcagcaagaaattcaacctgatgctggaaaccaaagttaccgccgttgaagcgaaagaagacggcatttatgtgacgatggaaggcaaaaaagcacccgctgaaccgcagcgttacgacgccgtgctggtagcgattggtcgtgtgccgaacggtaaaaacctcgacgcaggcaaagcaggcgtggaagttgacgaccgtggtttcatccgcgttgacaaacagctgcgtaccaacgtaccgcacatctttgctatcggcgatatcgtcggtcaaccgatgctggcacacaaaggtgttcacgaaggtcacgttgccgctgaagttatcgccggtaagaaacactacttcgatccgaaagttatcccgtccatcgcctataccgaaccagaagttgcatgggtgggtctgactgagaaagaagcgaaagagaaaggcatcagctatgaaaccgccaccttcccgtgggctgcttctggtcgtgctatcgcttccgactgcgcagacggtatgaccaagctgattttcgacaaagaatctcaccgtgtgatcggtggtgcgattgtcggtactaacggcggcgagctgctgggtgaaatcggcctggcaatcgaaatgggttgtgatgctgaagacatcgcactgaccatccacgcgcacccgactctgcacgagtctgtgggcctggcggcagaagtgttcgaaggtagcattaccgacctgccgaacccgaaagcgaagaagaagtaatttttcgtttgccggaacatccggcaattaaaaaagcggctaaccacgccgctttttttacgtctgcaatttacctttccagtcttcttgctccacgttcagagagacgttcgcatactgcactccgttgctcgttattcagcctgacagtatggttactgtcgtttagacgttgtgggcggctctcctgaactttctcccgaaaaacctgacgttgttcaggacttgcgctttgaacacgctggcgggcgttatcacgttgctgttgattcagtgggcgctgctgtactttttccttaaacacctggcgctgctctggacttgcggactgaatacgctcacgcgctgcgtctcttcgctgctggttctgcgggttagtctgcattttctcgcgaaccgcctggcgctgctcagggctggcggactgaatgcgctcacgcgctgcctctcttcgctgctggatcttcgggttagtctgcattctctcgcgaactgcctggcgctgctcagggctggcggactgataacgctgacgagcggcgtccttttgttgctgggtcagtggttggcgacggctgaagtcgtggaagtcgtcatagctcccatagtgttcagcttcattaaaccgctgtgccgctgcctgacgttgggtatctcgtgtaatgactggtgcggcgtgtgttcgttgctgaaactgatttgctgccgcctgacgctggctgtcgcgcgttggggcaggtaattgcgtggcgctcattccgccgttgacatcggtttgatgaaaccgctttgccatatcctgatcatgatagggcacaccattacggtagtttggattgtgccgccatgccatattcttatcagtaagatgctcaccggtgatacggttgaaattgttgacgtcgatattgatgttgtcgccgttgtgttgccagccattaccgtcacgatgaccgccatcgtggtgatgataatcatcattgtcatgatgatgatggtcatgatcgtcgtcgtcccagtcgatgctgctgaatagtgcgtacgtggtagcaacgcccatgctatagccgaatccgcgtacaaagctgtcaacaaacggttctccggctggtggtggcagataaaccggcggatacgcagtattggcccagttcccgtaaaccacggttgggttgtagttgggaatatagaccacatcaggattggcgggctcaatggaaatgacggttgttgccggctctgtaatgacggggttggcagttaaaactgtattggatggtatgacgggtgccgtgactgtctgttttaccggtacagctttcttcgttgtggtaataactttctgttcggtactactcttcaggctgccggtttgttgcgccagttgccgcaatcgctgtacgctgtccatcacgtcctgcggctgggccagaaaagcatcgcccaggttttgcacccattgcgggttttcgcccatcaatgccatcaattgtggaaaggccaccagacttttaacgctggcgtcccacggctggtcagataccgcctgaatagcagcatcgccttgtttaagtggattatcgtggctccattgcactgcttgagcaacgtttgtcggataggtacttgccatcagcacctggctaagtagggcgtcgggatacagcgcgacgggcgcgacccattgatctatttgtgcagtgctgaatgcggatttgacgacggcgggtgttacgggaggtgcggaaaccgttgcaggaaacgtaaccgcggcagcgtcagacacagccagttgtgtgctttgcggttccacaggcgcttccactgtgcggctttttatatatagcccggtagaggcggcacaaagcccggcactgcaaattagcgccagcacatggggtttaaacggcaaagtcattttcataattcggatctcaaggaaatcgcaatggtcggcgaactgccacccgcaggtgctgtgaatccgagtataaagaggcggtagtttaaattttgactaatcttgggattcgttgagaaaggtgattatcaccatgcgaattaacgaagtttttacggagggaaacaatctctagaccatccttaacgattcagccacttttttatgttgcttttttgtaaacagattaacacctcgtcaaaatcctgctattctgcccgttgcggtactgggcatttaccctacaaactgctgtctcacaggagcgtgaagagaatcgcctgccgcactatgacaatgagagcgaggagaaccgtcgtgctagaagaataccgtaagcacgtagctgagcgtgccgctgaggggattgcgcccaaacccctggatgcaaaccaaatggccgcacttgtagagctgctgaaaaacccgcccgcgggcgaagaagaattcctgttagatctgttaaccaaccgtgttcccccaggcgtcgatgaagccgcctatgtcaaagcaggcttcctggctgctatcgcgaaaggcgaagccaaatcccctctgctgactccggaaaaagccatcgaactgctgggcaccatgcagggtggttacaacattcatccgctgatcgacgcgctggatgatgccaaactggcacctattgctgccaaagcactttctcacacgctgctgatgttcgataacttctatgacgtagaagagaaagcgaaagcaggcaacgaatatgcgaagcaggttatgcagtcctgggcggatgccgaatggttcctgaatcgcccggcgctggctgaaaaactgaccgttactgtcttcaaagtcactggcgaaactaacaccgatgacctttctccggcaccggatgcgtggagtcgcccggatatcccactgcacgcgctggcgatgctgaaaaacgcccgtgaaggtattgagccagaccagcctggtgttgttggtccgatcaagcaaatcgaagctctgcaacagaaaggtttcccgctggcgtacgtcggtgacgttgtgggtacgggttctagccgtaaatccgccactaactccgttctgtggtttatgggcgatgatattccacatgtgccgaacaaacgcggcggtggtttgtgcctcggcggtaaaattgcacccatcttctttaacacgatggaagacgcgggtgcactgccaatcgaagtcgacgtctctaacctgaacatgggcgacgtgattgacgtttacccgtacaaaggtgaagtgcgtaaccacgaaaccggcgaactgctggcgaccttcgaactgaaaaccgacgtgctgattgatgaagtgcgtgctggtggccgtattccgctgattatcgggcgtggcctgaccaccaaagcgcgtgaagcacttggtctgccgcacagtgatgtgttccgtcaggcgaaagatgtcgctgagagcgatcgcggcttcagcctggcgcaaaaaatggtaggccgtgcctgtggcgtgaaaggcattcgtccgggcgcgtactgtgaaccgaaaatgacttctgtaggttcccaggacaccaccggcccgatgacccgtgatgaactgaaagacctggcgtgcctgggcttcagcgctgacctggtgatgcagtctttctgccacaccgcggcgtatccgaagccagttgacgtgaacacgcaccacacgctgccggacttcattatgaaccgtggcggtgtgagcctgcgtccgggtgacggcgtcattcactcctggctgaaccgtatgctgctgccggataccgtcggtaccggtggtgactcccatacccgtttcccgatcggtatctctttcccggcgggttctggtctggtggcgtttgctgccgcaactggcgtaatgccgcttgatatgccggaatccgttctggtgcgcttcaaaggcaaaatgcagccgggcatcaccctgcgcgatctggtacacgctattccgctgtatgcgatcaaacaaggtctgctgaccgttgagaagaaaggcaagaaaaacatcttctctggccgcatcctggaaattgaaggtctgccggatctgaaagttgagcaggcctttgagctaaccgatgcgtccgccgagcgttctgccgctggttgtaccatcaagctgaacaaagaaccgatcatcgaatacctgaactctaacatcgtcctgctgaagtggatgatcgcggaaggttacggcgatcgtcgtaccctggaacgtcgtattcagggcatggaaaaatggctggcgaatcctgagctgctggaagccgatgcagatgcggaatacgcggcagtgatcgacatcgatctggcggatattaaagagccaatcctgtgtgctccgaacgacccggatgacgcgcgtccgctgtctgcggtacagggtgagaagatcgacgaagtgtttatcggttcctgcatgaccaacatcggtcacttccgtgctgcgggtaaactgctggatgcgcataaaggtcagttgccgacccgcctgtgggtggcaccgccaacccgtatggacgccgcacagttgaccgaagaaggctactacagcgtcttcggtaagagtggtgcgcgtatcgagatccctggctgttccctgtgtatgggtaaccaggcgcgtgtggcggacggtgcaacggtggtttccacctctacccgtaacttcccgaaccgtctgggtactggcgcgaatgtcttcctggcttctgcggaactggcggctgttgcggcgctgattggcaaactgccgacgccggaagagtaccagacctacgtggcgcaggtagataaaacagccgttgatacttaccgttatctgaacttcaaccagctttctcagtacaccgagaaagccgatggggtgattttccagactgcggtttaaaaagtcagcgcacgcgctgcgcataaacgacacaatgcccggtgaatgagattcccgggcatttttttatttctaaaccatcgccgttccgctgtttttctccggtaaggctgcgataattacatcaatggcgcaatgcgatttcggtgcattgccgggagcagaggaacacactatggattacgaatttctgcgcgatattaccggagtggtaaaggtgcgtatgtccatggggcatgaagtggtcgggcactggtttaatgaagaggtgaaagaaaacctggccttgcttgatgaagtggaacaagcagcgcacgcactgaaaggtagcgaacggtcctggcaacgggcagggcatgaatacaccctgtggatggacggtgaagaggtgatggttcgcgccaatcaactggaattcgctggcgatgaaatggaagaggggatgaactactacgacgaagaaagcctgagcctatgcggcgttgaggattttctgcaggtcgtggcggcttaccgcaatttcgtgcagcagaagtaaataaatctggcggagcctgggagctccgccagagccgttaaacagctggcatattgcgcccgtaataaatctcgcgcatttctttccacagcgcagcggtaatttcctggcgctcgctgtcggttaagtcttccggtttggtgtggaacatgtagtgcttaaggtcgaactctttaagcaacatcttggtatggaagatattttcctgatagacgttcacatccaccatgtcatacagcgccttcatatcgtcagacataaagttctgaatgctattaatctcatggtcgataaagtgcttcataccgttaatgtcgcgggtaaaaccgcgcacgcgataatcaatggttacgatatcggactcaagctggtggatcaggtaattcagcgccttcagcggagaaatcacgccgcaggtagagacttcaatatcggcgcggaaggtacataaaccgccttcaggatgactttccgggtaggtatgtacgcaaatatgacttttatcaagatgggcaacgaccgtttctggcagtgggccggggtgttctgttttgtcgatgagtttcgggtcaaccggttcttcactcaccagaatagtgacgctggcaccctgtggttcgtaatcctggcgggcgatgttaagaatattagccccgataatggaacaggtttcactcaggatttcggtcagacggttggcattatagagttcatcgatataagcaatataaccgtcgcgctcttcggcagttttggcgtagcagatatcgtaaatacaaaaactcagacttttggtcagattattaaagccatgcagtttcagttttttcaatttcttatcttctccttaggacggctgactagccagtgcgtcttgcagatactgaggtaaggcaaaagctgccgtatggattgccggattgtaataacggcatttcaggccagaggcgagaaaacgcgcctgaataatttcggtactgagatggcgtaaggcgtcgttatctgtcgcccatgcaaaagtcatgataccgccgtaataggtcgggatcgccgcctgataaaagccaacgtcgctgaagtaatggctgagtttgcgatggctgtcgatggcttcttcctgctgtaaaaagcagacgccgttttgtgcgacgaagataccgccaggattcaggcaacgtttgcagccttcataaaatgcgctagtgaaaaggctttcgccgggaccgataggatcggtgcagtcggagataatgacatcaaaggtctggctggtttgattaacgaaattgacgccatcgtcgatcaccagcttaaagcgcggatcgtcgtagctaccggcgttatggttgggtagatactgacggcagaagcttacgacacccgcatcgatttccaccatcgtgatactctcaacgtttttatgtcgggttacttcacgcagcatggcaccgtcgccgccgccgataatcagcacatgtttcgcgtgaccatgggccagtagcggaacatgggtcatcatctcatgatagataaactcgtcgcgctcggtggtttgtactacgccatccagcgccattacgcgaccaaatgcagcgttctcaaaaatgatcagatcctggtgatcggtcttttcatgatacagaacgttatctaccgcaaagtactgcccaaactggtcgtgtagcgtttcatgccactgttttttttcggccatgggttgatacctcctttgttaacacccgtaaaaaaagggcgcaacataatagctaacattgaccgcggatgcacggtcaatatttctacaaaaaggtatcagggattatttgacgtaggcaagcaggcttaaggaatcgcgggccagggctttgcattttttagcgacgggaatgccaatgccgctgagatcgcggtagctgtcttcaccgagggctttcatgtcgaaggtgtcgtaattactgaggtcccactggttttgctgagcgaaaaagaccagtgcgcgacgaatttgcccgttaggtaagttctggtaaccacaatcgttcttcagaaagacaaaaactgccgttaaatcggccatatcttcggcttcagactcgctgagcgcgtaactgtttgcgcagacggccatcaggctgccgaataacactgttctgaaaaacgtcttcattgcttctaccaggggcttaaagaagataaacgttagcacactgcgagcgaggcgacgaccattattgtcgattaaattgtgtctgcggcttgaccttcccgtaaggggaaggactatgctcaacgtttgattttgtttcgcctgcttaagaataaggaaataactatgcaacgtcgtgatttcttaaaatattccgtcgcgctgggtgtggctagcgctttgccgctgtggagccgcgcagtatttgcggcagaacgcccaacgttaccgatccctgatttgctcacgaccgatgcccgtaatcgcattcagttaactattggcgcaggccagtccacctttggcgggaaaactgcaactacctggggctataacggcaatctgctggggccggcggtgaaattacagcgcggcaaagcggtaacggttgatatctacaaccaactgacggaagagacaacgttgcactggcacgggctggaagtaccgggtgaagtcgacggcggcccgcagggaattattccgccaggtggcaagcgcagcgtgacgttgaacgttgatcaacctgccgctacctgctggttccatccgcatcagcacggcaaaaccgggcgacaggtggcgatggggctggctgggctggtggtgattgaagatgacgagatcctgaaattaatgctgccaaaacagtggggtatcgatgatgttccggtgatcgttcaggataagaaatttagcgccgacgggcagattgattatcaactggatgtgatgaccgccgccgtgggctggtttggcgatacgttgctgaccaacggtgcaatctacccgcaacacgctgccccgcgtggttggctgcgcctgcgtttgctcaatggctgtaatgcccgtagcctcaatttcgccaccagcgacaatcgcccgctgtatgtgattgccagcgacggtggtctgctacctgaaccagtgaaggtgagcgaactgccggtgctgatgggcgagcgttttgaagtgctggtggaggttaacgataacaaaccctttgacctggtgacgctgccggtcagccagatggggatggcgattgcgccgtttgataagcctcatccggtaatgcggattcagccgattgctattagtgcctccggtgctttgccagacacattaagtagcctgcctgcgttacctagcctggaagggctgacggtacgcaagctgcaactctctatggacccgatgctcgatatgatggggatgcagatgctaatggagaaatatggcgatcaggcgatggccgggatggatcacagccagatgatgggccatatggggcacggcaatatgaatcatatgaaccacggcgggaagttcgatttccaccatgccaacaaaatcaacggtcaggcgtttgatatgaacaagccgatgtttgcggcggcgaaagggcaatacgaacgttgggttatctctggcgtgggcgacatgatgctgcatccgttccatatccacggcacgcagttccgtatcttgagtgaaaatggcaaaccgccagcggctcatcgcgcgggctggaaagataccgttaaggtagaaggtaatgtcagcgaagtgctggtgaagtttaatcacgatgcaccgaaagaacatgcttatatggcgcactgccatctgctggagcatgaagatacggggatgatgttagggtttacggtataaaaagaccgtattcggaaatatgcccggatctctccgggcattaaactgatgacaaacgcaaatctgcctgatgcgctacgcttatcaggcctacgctagctgtgcaatccattgattttgcacaattttgtaggctggataaggcgttcacgccgcatccggcatgaacaacgcgcacgttgtcagcaatctgagcaagtcttacttcacatcatccggcagcgcataagccacaatatagtcgcccatcttcgtaccaaaactaccgtgaccgcctgcggagatcaccacatactgcttaccattcacttcataggtcattggcgtagcctgaccacccgctggtaaacgaccctgccacagtttttcaccgttgctcatgttgtaagcgcgcaggtagttatctgccgtagcggcgataaacagcacgttacccgccgtggagattggcccgcccagcatcggcatacccatattgaacggcaccggaaccggcatcgggaacggcatactgtcctgcggcgtaccaatacgtttcttccacaccacttcattagttttcagatccagcgcgctgatataaccccatgctggctgtttacatggcagaccaaatggactgaggaacgggttgagcgtgacaccatacggtacaccgtactgtggctgaatgccggattccgtacccgtgcctttggcatctttcggctgctccatcgggttgccaggaccacgcgggatcagtttgctaacaaacggcagtgccattgggttggcaatcgccacttcacgatttggatcaacggaaatcccgccccattcgaacatccccaggttacccgggaagaccagcgtaccctgttcagatggcggggtgaaaatgccttcatagcgcatctggtggaacatcacgcggcacaccagttggtcaaacatggtggctccccacatatccgcaccgctcaaatctttcgtcggacggaagctcagttcagaaaacggttgagttggggttacgtaatcgcctttcgctgcaccttggggaaccggtttttccggtgccggaaccaccagttcgccattacgacgatcgagcacaaaaatgttgccggttttcgccggagcgtaaataactggcactttctgaccattaacggtgatgtccgccagcgtcggctgtgccggaagatccatgtcccacaggtcgtggtgaacggtctggtagctccacgccagtttcccggtagtggcattcagcgccagaatgctgctggcataacgttcctgttccggtgtgcggttaccgccccagatatccggcgtggtcacgcccatcggcagatagaccagatccagcttcgcgtcataggccgctggtgcccaggagtttgggctgttaaaggtaaaggtgtgttcgtcagacgggattgcgttcggatctttcgcgccgggatcaaaagcccacagcagctccccggtgttgacatcaaaaccacggatcacgccagacgtttcgcgggtactgaagttatcggtaacactaccggccatcacgatggttttatcggtgataatcggtgggctagtcggttcatacagacccggtttggtgtctggcatattgctttgcagattgagcacgcctttattggcgaaggtttcgcacagtttgccgttttcagcgttaatcgcaatcagtcgaccatcattgaccggaagaatgatacgacgcgggcaatccgccatcacttccgggctagcggtttctgctttggcttcatgataagagacaccacggcaggttacgtgctggaaagactcgttggttttcagctcaggatcgtaatgccatttctctttgccgctggcggcatcaagcgcaaacaggcgctggtgagcggtacacaggtaaagggtgtcgcccactttaatcggcgtcacttcattggtgatttcacccggatcgttcggctgcttcacatcgccagtacggaacacccaggcttctttcagattatggacgttatcggcgttaatttgtttcagcgggctaaagcgttgaccttcctgattacgaccataggcaggccagtcctgatcggctacgggggagatagcttcagcaggtgtggcatcggcgcttaaggtgccgttgatctcctgcggatcgttaaatccggcccaggtcaggataccaccgctaatcagcagtgcgaccaccagtgcggcaactgcgccgctggcaggaatgaccaggcgacgccagacaaacggcaggatcagccagatgccgaagaagaccagaatgtcgctgcgcggagtcagcgcccagaagtcgaaaccaacttcccagacgccccaaatcatggtgccgagcagcagggctgcgtatagccaaagcgcggcgcgtttactgcgccacagcatccaggcgacgccgagcatcacaaggccagcgatagggtagtaccaggagccgccaatcgcgaccagccagcctccgccaatgagtagatacagcccgcaaagcgctgcaaaaagggctgttagcgtgacgagtaatcgtcggctgcctgtattgttaattgccataaagagacaccatttcaattcattaatattttagtagcaattaattataggttttaacatgtgtgatcgtcatcacaattcgagctttattaacagattccgcgaatgaatagttttactggtatactgcgtgtcttgcgctttgttgcggtgccaaaacctgcccgtgcgaagtgatttgtttttaaatcatatggttagagatatgaaacatactgtagaagtaatgatccccgaagcggagattaaagcgcgtatcgccgaactgggtcgtcagattactgagcgttacaaagacagcggcagcgatatggtgctggtgggtctgctgcgtggcagttttatgtttatggcggacctgtgccgtgaagttcaggtatctcatgaagtcgactttatgaccgcctccagctacggtagcggcatgtccaccacccgtgatgtgaaaatcctcaaagatctggatgaagatatccgtggcaaggacgtgctgattgttgaagatatcatcgacagcgggaatacactgagcaaagtgcgtgagatcttaagcctgcgcgaaccgaagagcctggcgatttgtacgctgctggataaaccgtcccgtcgtgaagtgaacgtcccggtagaatttatcggtttcagcatcccggatgagtttgtggtgggttacggcattgattacgcacagcgttaccgtcatctgccgtatatcggcaaagtgattctgctggacgagtaagtgtgaagttgccggatgtgttgcatccggcatggcatttttatttgtggttggcgtgtttcagcttgaggttggaaatcccgtgacggtaacgttgctcaagggtttcgcggttggtggcggtaacatccagatcacgcagcaagccgtcgtgaatgccgtaggcccagccgtgaatggtaactttctgcccgcgtttccacgcactttgcataatggtggagtggcccaggttatacacctgttccatgacgttcagttcacacaaggtatccagacggcgctcttgcggcatttcgccgagcaaactgctatgtttgaaccagatatcgcggatatgcagcagccagttgttgataagccccagttccgggttttcaactgcggcttgtacgccgccgcaaccgtagtggccacagataataatgtgttcaacttcgagtacatccactgcatactgaaccacggaaaggcagttcaggtcagtgtgaatgaccaggttagcaacattacggtgaacaaagagttcgcccggctcaagaccggttaaacgttctgcaggaacgcgactgtcggaacatccaatccatagaaagcgcggtttttgcgcttgtgccagtttctcaaaaaacccgggatcctcttccaccagcattttactccatagtgcattgttgctgatgagtgtatctatgtctttcatggaggttaacgacctgtaaccaaataattacgtttggctaatatagggcaactccgggacgatttaaaccacagataaagtgtaagaacgtaaggtaagtaaaaatttatgaccattgcactggaacttcaacagcttaaaaaaacctatccaggcggcgttcaggcgcttcgtgggatagatttgcaggtcgaagcgggtgatttttatgcgcttctcgggccgaacggggccgggaaaagcaccactatcggtattatcagctctctggtaaataaaacctccgggcgggtcagcgtatttggttacgatctcgagaaggatgtcgtgaacgctaaacgtcagttgggactggtgccgcaggaatttaacttcaacccgtttgaaaccgtgcagcaaattgtggtgaatcaggcagggtactacggcgtggagcgcaaagaagcgtacatccgcagcgaaaagtatcttaaacaactcgatctatggggaaaacgcaacgaacgtgcgcgtatgttatctggcgggatgaagcgccgtttaatgattgcccgtgcgttaatgcatgaacctaaactactgattctcgacgaaccgaccgcaggcgtggatattgaacttcgccgcagtatgtggggctttttgaaggatttaaacgacaaaggcaccaccatcattctcaccacacactacctggaagaagcagaaatgctgtgccgcaatatcggcattattcaacacggtgagctggtggaaaataccagcatgaaggcgctgctggcgaagctgaaaagcgaaacctttattctcgatctcgcaccgaaaagcccgttaccgaagctcgatggctatcagtatcgactggtcgataccgcgacgctggaagttgaagtgctgcgtgagcaggggatcaacagcgtatttacgcagttaagtgagcagggcattcaggtattaagtatgcgtaacaaagctaaccgtctggaagagctgtttgttagtctggttaatgaaaaacaaggagatcgcgcatgatgcatctttactgggtggcgctaaaaagcatctgggcgaaagagatccatcgctttatgcgtatctgggtgcagacgctggtgccgccagtcatcaccatgaccctttactttattatcttcggtaacctgattggtagccgtattggcgatatgcatggcttcagctatatgcagttcatcgtaccggggctgatcatgatgagcgtgatcaccaatgcctacgccaacgttgcgagtagtttttttggtgccaagttccagcgtaatattgaagagctgctggtagcgccggttccgactcacgtcattattgccggatatgtcggcggtggcgtggcgcgtggtctgtttgttggcattctggtgacggcaattagtctgttttttgtgccatttcaggtgcatagctgggtattcgttgccttaacgctggtgctcacggcggtgttgttctcccttgcgggtttgctgaacggtgtgtttgccaaaacgttcgatgacatcagcctggtgccaacctttgtgttaacgccactcacgtatttgggcggggtcttttacagtctgactttgttgccgccgttctggcaagggctgagccacctgaacccaatcgtttatatgatcagtggtttccgctacggcttcctcggtatcaatgatgttccgctggtcactacctttggcgtactggtggtctttattgtggcgttttatttgatctgttggagcctgatccaacgtggacgtggtttgcgtagctaaggctatttcctctcctctggatttgggggagaggagttttgacggctatcaccctttatcaacaatggtcagggtagactgattttcggctaaggaggaaggcgatgttaggttgggtaattacctgtcacgatgaccgggcgcaagagatactggatgcgctggagaaaaaacatggggcacttcttcagtgccgggccgtgaatttctggcgcggattaagctctaatatgctcagccgcatgatgtgcgatgctctgcatgaagcggactctggtgagggtgtcatcttcttaaccgatatagccggagcgccaccgtatcgcgtggctagtttattaagccacaaacactcccgttgcgaagtgatttctggtgtcacgttaccgttaattgaacagatgatggcttgccgtgaaaccatgaccagtagtgagtttcgcgagcgtattgtcgaactgggtgcgccggaggtgagtagtctttggcaccaacaacaaaaaaatccgcctttcgtcctcaaacataatttgtatgagtattaacccgcgattctgatggcgcttttgctacaataaaagcgttgtttcaccctcggttattttttcatgtacaaacaagctgttattctcctgctgatgctgtttaccgcaagtgtcagtgccgcgttacctgcccgttatatgcaaaccatcgaaaatgctgcggtctgggcgcaaattggtgacaagatggtgaccgtggggaatattcgggccggacaaatcattgccgtggagcccactgccgcaagttattacgcatttaattttggctttggcaaaggttttatcgataaaggtcatctcgagccggttcaggggcgacaaaaagttgaagacggtttgggcgacctcaacaagccgctgagtaatcagaacttagttacctggaaagatacgccggtctataacgcgccgagtgcgggaagtgcgccatttggggtactggcggacaatttgcgctacccgattttgcataaactgaaagacaggttaaatcaaacctggtatcagatccgtattggcgatcgactggcctatatcagcgcactggatgcccaacccgataatggcctgagcgtgctaacctatcaccatattctgcgcgacgaagaaaacacccgttttcgccatactagcacgaccacaagcgtacgcgctttcaataaccagatggcctggctgcgtgacaggggatacgcgacactgagcatggtgcagctggaaggctacgtgaagaataagatcaatctccctgcgcgagcggtggtgattacctttgatgatggcctcaagagcgtgagccgctatgcgtatcctgtgttgaaacaatatggcatgaaggcgacggcgtttattgttaccagtcgcatcaaacgtcacccgcagaagtggaacccaaaaagcctgcaatttatgagcgtttctgagcttaacgaaattcgcgatgtatttgatttccagagtcatacccattttttgcatcgggtagatggttatcgccgacccatattactgagccgtagtgagcacaatattctgtttgattttgcacgtagtcgccgcgctctggcgcaatttaatccgcatgtctggtatcttagctatccgtttggcggatttaatgacaacgccgtgaaggcagcaaacgatgccggatttcacctggcggtgacaaccatgaaaggcaaagtaaaaccgggggataatccgttgttactaaaacgactttatatcttaagaacggatagcctggagacgatgagccggctggtgagtaaccagccgcagggataacaatcaagcaacctgtaccggaatcgctttcgcggtacgtttcatttcattgtcgccttcaaaataggcgacgttgggtcgccaggtgcgagcttcttcatctggcatggtaacgaagctggcgatgatgacaatatcgccgacactggcgcagtgggccgccgcaccgttaacagaaataattctgctaccgcgttctgccgcgatggcataagtggagaaacgcttgccgttggtgacattccagatatcaatggcttcgttttcgagaataccggctgcgtcaagaaaatcctggtcaatggcgcaagaaccttcatagtgcaggtccgcatgagtcactttcacgcggtggagtttgccctgcagcatcgtgcgaatcataacttctacctttctaccctgtcgttaacgaagcaggcgatgcctgctttgaggaaattctcacgcagtattgcccgatttttgtttagtgtctactcatctgacggcatttgcgtcagcagtttgcgtaccgcgccgaagcgtgccatgtatcgcctgtaacgaattgatatttctctgaacgctgctcggtaaacaataaagaggtggctgacgatagcgcgccttgactggatactgccttcacgcaaagccacacggaagacagggaagatggatgcaccgagtaccacaccgcatgacgcggtatttaaacaatttttaatgcatgcggagacggctcgcgactttctggagatacatttgccagtggaattacgcgaactttgtgacctcaacacgcttcatttagagagcgggagtttcattgaagagagcctgaaaggacacagcacggacgtgctctattccgtgcaaatgcagggcaatcccggttatctgcatgttgtgattgaacaccaaagcaagccggataagaaaatggcctttcgcatgatgcgttattctatagccgccatgcaccggcatctggaggctgaccacgataagctgccgctggtggtgccgatactgttttatcagggcgaggccacaccttatccgctaagtatgtgctggtttgatatgttttacagcccggagctggcgcgacgcgtctataacagtcctttcccgctggtggatatcaccatcacaccggatgacgaaatcatgcaacatcggcggattgcgattctcgaactactgcaaaaacatattcgccagcgcgacttaatgttattgcttgagcaactggtcacgctgatcgacgaagggtacactagcggaagtcagttagttgccatgcaaaactatatgctgcaacgcggtcatactgaacaagcggatttgttttacggtgtgttgagagacagggaaacgggaggggagtctatgatgacgctggcgcagtggtttgaagagaaagggattgagaaggggattcagcagggaagacaggaagtaagtcaggaattcgcccagcgtcttctgagtaaaggaatgtctcgggaagacgttgcagagatggcaaatttacctcttgctgagattgataaggtaattaaccttatttaagttacctgtgttatgacagatgacgtggggtaaattaataactggcgccatcagccgtagcgccagttaagtattacgccagctcgaccattttgttgtcgatcaggcgagcatcgccaagccaggcggctaccagaattactgcccgtttgctggtttcagaaacttccagcaatgtgtcggcatcgcgaatctgaatatcatcggcgcggaagcctttttcattcagttcttgccccgcaatggtaataatttcatcgagatcccgttccccagcctgcaatttgtcagcaatgctacttaaaactttgtacagaccaggcgcaattttgcgttgttccgccgtcagataaccgttacgggaacttagcgccagaccgtctttggcgcgcataattggcacaccgacaatctcaatatcgaagcccatatcggcaaccattttgcggatcagcgccagttgctgaaaatctttttcaccgaagcaggcgatgtccggctggaccaggttgaacagcttgctgacaatagtgctaacgccgcgaaaatgtcccggacggctggcaccttccagcatggtgctaaggccaggaacgtcaacgtaagtgtgggtttcagtaccgttcgggtagatctcttttacgctaggggcgaaaactaaatccactttacgtttgtttagcttctcgcagtcctcctgcaaggtccgtggataacgagccagatcttccgggcggtcgaactgcatcgggttaacgaaaatactgacgacgaccacatcggcgcgggctttggcttcgtcgaccagcttcatatggccatcgtgcaggttacccatggtaggcaccagcgccacgcgcttgccttccatacgcaggcggcgaatttgctgacgcagcagcggcagggtttcgataattaacacaacgtgactccttaatggaaactgtgttcttcgcccggataaacgccggactccacttcagccatatactgccgcacagccgcgcggatgtcgcccgtttcggcgaggaaatttttagcgaatttaggaatgtgaccgccggtaataccaaaggcgtcgtgcatcacgaggatctgcccgtcagtgacgttgcctgcgccaatgccaataaccgggatcgccagtgcttcggtaatacgttttgccagttcaaccggcacgcattccagcaccagcagctgtgccccagcagcttctaaggctaatgcatcgctgagcagttgatcgcccgcttcatcgccgcgcccctgaactttgtagccaccgaaaatattcacactctgtggtgttaaacctaagtgaccacatacaggaacggcacgttcggtcagcatttgtacggtttctaccagccactcaccgccttcaattttgaccatgttagcaccggcacgcataaccgttgcggcgttttcgaaggcttgttccggcgtggcatacgccataaacggcaggtcagccagcagcaggcagtttggtgcgccgcgacgtacggcggcagtgtggtaggcgatatcggcaacggtaactggcagggtggagtcgtgcccctgaaccgtcatgcccaggctatcgcccaccagcatgacgttaagcccttcatcagcaaagagtttggcgaagctatagtcataagcggtgatggtcgcgaaacgttttttttcctgtttgtacttctgcagtaaggagatggtggtcggtttcataacgtatcctgataaattgatgttgtgctgtctggcattttatcagtcacattggtgggggcaatgatttatccgtagcagcactgccagaaggtgacagtgctgctacgttatcagggataggttacctggaaagtactggtggctttaaattcgccgggttcgatagcaatattcccgtcttgctttaatgttgcctggaaatgaagaggctgacttgtgccgttaccttgattagggtaaaccccatcggaggtgtcatcttcggtttcataatctatataaacagaattcgtatcattaggttttaatgtcattagcggatttttactggttgctaaaccttcaatgagtacgccaacgcctttggcggcagtgcttccagtaagcgtattaccaagcagttgtgtgttttgagtacctacttttccagtgacgagttttgtttcaatattacgcacacgaatacaattctgaaggctgatatcaaagggaacaggactagcgccatttttaattgtcccagagctatattctcccattctaaccgtactaccattgacacttggcccggtaagtatggaggtaaaacatgttggtaaggttaatttgacattattcagtgtgaaattgacataaatgtggttgctgtgatctacaacttttgtaccaggactgtaggccttaaagctataaaggtaattactactactggataactggacttgctgattaagtgtaggatcgaaattagtatctgtataaaattcaacagttatgttgtgtactataccaccaatagcccaaaacttatcgtagtcgtctgctttgttgcaacccttagtttgtagatcgctgtctgtgacggaaaagaaaaattcttggttggaaggatctccgatatagattcctgggctttgaatgtcagttattgtatcgtatgcagaccagaccctacttattaacatggtgtaatacagaccaggaacagatgtattaaatagtttatgtccgccataatctttaccactatagaccatggcattttcaatagttattggaccaggattcgctctgccagatgtattgcagtaaagaataccaccaccggtacctgtatccaggtaactccagtacatttttaccccagtcgggccgagctgcgtgggtttataaaaaaccaagttgcttgctgtacttgtgtaattaaaggtcatctgtgcggcagtggaggggcctcgatagttatcaactcctgcattatttcccacaataaaacttgtatatgcactgactgtattacaacaagaatacagtgctaaaaaaagaatgtacctgaagatagtcttcatttttactccaatgtttctttattgttatggtttgcgctgtttttgtttgttattcgtagtaaatatccactaacacatggctcataagttgaccagatgtaacactcaatgcaggatcgattttttgcattcgggtgctaaatttccaggaactaccattcatgtcatcgctcattactggataaacggaacgagatccgccactagcattaagaacattgaatgtattcgcgctatcctgagtagaaaatataactactcctacattacttgctccactgctaatttcattagcaaatatttgcctagagccagcagccatgacaccgctaagggctctaaaatcaatatgtaactgatttagcacatcgccagttccctgtaatgcacagtcggatacagtgatagtgaactcttttccacctggttgataactttcaggagtaacattaccactaaaatatcccaccccaacgacgccaagatcaatattaccctggttactgattccgcttttgcaggtgctgttttttacattggcaacaaggtcaatatcctgtccagcaatggctggacaggcgatgcaaaacagtaaactcagaaacagaattattctcttcatcagcttacgttgagtgggatgcatatatagttcctgaatctgtaagtctgttagttataggttactgtaaatgtggctggtgcagaaaacttacccgcagtgacattgtttacggttttatttttttccacgaccaggcgtgcactcatcggataataaacgaccgcattggctgcagtggagattgttacctcttgacttgctggtgttacacagctaaattgtgttgcactccctgttgccggagttacagtgctccagacttcaacggcgacagcacttgctttatctgcggctgtggaaccatttgcaaaccccgcaccgtcattagcagttccctcgcatgtggctcgcttggttaattttatttgcgcttttttattggggatacccgcacagtctttgaatttgagtttgaatgtttttactttggtcttggcattgatttcagaaatatatacatcaccaaaatcaacaacagaaatgtcctgatcagagtcatttactaatgtagcggtacaagtacccatttctacagtagtaataacggtcagtccaatactgtctgttgccgcataagagagtacgctgaacaaactggcagccaaaacgacactgctggataatccataacgtaaatttttaaatgtcatcataattatccttcttattgatagatgaaattaaacgtcgccagtgcacgaaaattccccggtacgccttgccctgcatctgtttcacgtagcgcaacggtcatttcaagacccttatcgggctgcatctcgtctgtgctccagcgtatcttttccgcactgttaggtttaaggaaagtggcatcatcagtagtccgttttttgaaacccataccgatattacttgtcgtgctagaactatcaccagactgcggtataataagcttaggactgctactacttgcatttccggtcagagtggtatcaatccaactgatgccactgctgcacccactggcaaccagtttaaaatcagcctgagattctgtcgttttattcgcgatcttatccagacccatcttagggattctcaatgtgtagttattattgccatcattcgtgacgttattaccagtaagtgtgatgttacaggttgtcgctttgacagtggctgtaaactctacattaatatccgttgcaaatacactgggacttaataatattcccatcagtatcactattttatgtggcgttgtttttatcatttgacgtcccttgtagttactgaatctgacaccgaattccattcagaataatagattgtgctattttttctgcttctgggctttgttgataatgcgcaagacaacttacgggtttactttgttcgagccatttaatgctgatatttccctgctgctcaataccacgaacaaatgcttgtccaccctgtccaacattaccaatgacattgccttgctcatcataaatatctgcagcaaatggaatatttttaccatcacttcgtgtgatgttcataatggcactttgcccttgcacggtttcaaaatcagcaaagacgacactaccctgacgcggtacagctactgcactggtactttttaattcaacatcgttctcaagatcgttgatatccagcgcgatacggttttcatgataaggagaaagagcgctggtgacaccataaccccatcgatcgatagtactgttgccataatttattcgcgctccttgagcacctggagcctgaactaccgccagtgtatcggagtcgctaaaactatcattactgaaagtcagtccaccgctatgcaatacaaaaccaccgtcggtgctgagagaaacttgacggctgttatcgctatttgcagaaatactacctgccagcgttccccatggactctcatagctggcataacccccaacataactcaaatctttgctggctttattcatcgtatagccagtattcacgctataactgacgcgagcgttatcgctatagccactgctgctaacgttgagttggttattacccttaaagtcactgcttatttgagtatcaatactctggaaaccactagtacgttgttcagtgccaagtaatttttcaattggaatggtgaaactaagataaacgctatcgtcagtgtcgccgtcttcattccaactacgctgggcactgacactgtagctgccccaggatgtactgttactgtagccaatagagtaattgctacgattttgtccggaagcccagtaatcggaccaacttccggaaagataaaaactaccgtaatcttttttctcaaatttcaacggttggttaatactgaccgtaacctgatttttcatgcgactgtaattacgcatggatttcggttcaagatcttgttcgggatgtttcacttcatcaattagagttagtgcatcattaagaccaaggtaattctgtgtgctatagcgataggccgcgatattcagactagtacttgtttcttcgaataacttgttccaggaaacacgataactttgcccctggtatgttttatcatccgggatacgaacattggaatgagtcacatcgaaagaaaatgcaccaacactagtattcagaccaagacctaacaaaccagcggtatagttattatcggttatctgaataccggtataacccgtcagatagttattcaggccgtagtagtagcttgcttgaaataaattaggctcatcctgaatatcatcttttaagacctgaccgccgctaatatcccaacgtccaacgccagggcgtaacatttgaacaacggaactgaaaggttggctgaatgtccgcttactgccatcggattcttcgatggtaacaataagatcgctgccgtacccactcggactcagatcatcaatgacgaaagcgcctggcggcaccgtcgtttcataaatcttatagccaccttgcgtaatagtgactttggcgttggtattggcaacgccatgaatgataggcgcaaagctggctaaagtcggaggcaacatgcggctgtcactgtataaacgaatgcctcggatactgacggaatcaaaggtttcgcccgtcgtataagactcaccaagaatgagttgagaacgcaggctggcgatatcacgctgaacataccgattcttaaaatcataattactgccagaatcggtcatccagttgtagttgccgctggcacgcagtcgccatgcacctaaattcatcccaccgttaaatgcagcataaatgctttcattttttcgaccaggggtttcactatgatatccgttgaggttgtaactcaacatggccgcattaatgccgttttcccataagcttggatcaacatagttttggtaatttttcattacccaggcttgaggaacgtctatatccagacgttgatcgttaacgtcataacgaacagaagcctgagggataatttccgtcaaattgaggcaattgccgagcgtttcatccctggcaagcagaacggctttttcgttatttatatcgggagaattaatatgaaactgcaataaattctttaatgtgatacaagcctgggcgttcttttttccttcaattgcgacaaatgtaatactttggttaatgattggttggtcgtttacataaacactgacgtcgtaaacacccggtatagcggggttaccttcactgtaccggctgagatcaatattagatgcattctgccccatcaggaaggtatggtcatattcaacgagttcagcactgaaagcagtattgcaatacagcagcgcgcaaaacgtggcgatacgggtcagatgatgataatttttagtatattctatagtcacgctatgcttcctgcggaattatatccttgcctgattacagcctggcattaccttcaattgcgccaccaaagtcattaatggcgtaaaaatgcacttttgcagaattcgctttgccattaaggccattgactttcatgacctcatcactaaatggtgcaatcattttcacatcaatcggatagcgtttaccgctagcttctaaatcaccactgctaaaagagacgtagtaaggggttggattggtcactcgtaaactcgccttaccttcactaccactccagaaccacttcagggctaacggggcttcagagggatttcccttcaatccatccgggcgatagaaaagttttatacgtgtgcgaaatgccagttgcagcaggctttgattcgcgaccttttctgcatctggttttggtggaacttccagtacgttaaaccagaacacgctctctctgtctttaggcagactggtgctggctgtgtacattaatttgattgtttgcccacgtttggcatcaatacggcttactggcggcgtagcagtaaaagggactgtaatactgccaggctcagcgttgtcatcgccagtatctaaccaactctggacaagcaacgggttattccctttattttccagacgtacgttgacacttttttgatcgcttttatatattacgcgagtaccgctaatgacaatgtccgcaatagagctactactaaaagccatacaggttacgaagcataaagctgttgtatgtttggtgttaaaaaacataaaccatccctgatagagttaattaaaacagggaataatataaaatagaaattattattccctgtatattcattcaatcaatttaactggtgaatacttactgataagtaatggtgtatgcagtgttagtttttacataaccagcagttgctgtttggtctgcgacggcacgaacgtaagacgctttaaaatcataaacagcagattttgtcgttgcatccagggctttagtatacacatcgccagggttgttaatttgaacctgtttgatagtggaaccatcaatattgtgtagagcgatattaacgccgtcagatgggttgttaatagacatgtcgttgttcaaagtccctttgctgttaccaaagaaaacagaaccgaaggtcattttagccgtgctacctggattcggatttgctttgctgcagtcaacggtgatgctgaaaggtttagctttagcgccaacggtgtcattcagtacgccagcatcgatttcaccaacggttgcggtttgcagcaggatcagaccatccttgttaccgccgtcaacgcgggtttcacaggtgttatcaacaaccagaccactgatatttaactgaccgccgtccatatcagcagaagcagtacctgcaaccatcgccagcataagaccagacagggcaaaacctaattttttagacataaaaatcctttaataaaattccattagtcagactacatgtttgaagaatgactattcatgacacaaataggagaaacaaatgttagatattaatgagcaatgatatttgttacccaaatttacaaccattgttcattaggtcgcctattgtgcactttagaagcttttgaacaaattaaatttacttaattcaaaattaagtaaaaataagttcacaagtgcaattggttagggtatggagatgggattgatatttatttataggaagttatattatttccgcaaagagatgtttaaactaaaatcgtaattaaggaaagagatgagatatgattttcagaaaatatttatattcgcaatataaataaattaccatttgtttaatttgtcaaatgctcttgtatgtaagatttgacgcaacatctccccatcaggaaacaccaactccggcgcgatttcaaacagcggccacagcataaatccacgattcttcatatcgtagtgcggaacggtcaggcgttcagtatttatcacttcattaccaaacagcatgatgtcgagatccagcgtgcgtggtccccagcgttcagctttgcggacgcgaccttgctgcaattcaatacgctgtgtgtgattgagtagctcttcaggtgcaagagaggtttccagcgccacggctgcgtttaagtaatcgggttgatcttgcggccccagcggtggggtgcggtaaaagctagaaacggtaagaatgtggctttcagggatatcgcctaatgctttcagggcagcattgacctgctccagcggagaggccagattgctgcctatggcaatatacgccactgtcatgcggtaccctcacgacgtggtgcgcgtttgcgtggacgacgagtacgacgacgcggactcggttcttcatccagctcgttgagcatccctttttggtctggtggcgcggaaacctggaactcaccccaccatttcaccagacgctgcagttcagcgttacgctcaacttcagctcgcaaggccaacaggtcataagccgcacggaacttaggatgctccagcagtttccatgcgcgtttaccctgacgacgggacatacgcaactgcaactgccagatatcgcgggttaatgtcgtcagacgtttcgggattgccagactacggcaggcttcgtccagcacgtcgttcatcgccagcgcgaaagcgtcgtgataggtcaggccgctttcctgggcgatcttctgtgccgtctccagcagtgggtaccagaacatggcggcaaacaggaacgccgggttcacgcgcatatcgttatggatacgcgtatcggtattcttcagcacctgttcaatgatccgctccatcgggctgtcgccattttccgtgaagtagcgggtaatggtcgggaacagcggctggaacagatgatattcacacaacagcttataggtttcgtaaccgtagcccgcttgtagcagtttaaggctttcttcaaacaggcgtgccggtgggatatcgttcagcagggtagcgaggcgagggatcggttctgcggtttccgggctgatgcgcatacccaatttggcggcaaaacgtaccgcgcgcagcatacgtaccggatcttcacggtagcgcgtttccgggttaccaatcagacggataacgccgtccttcagatccttcatgccgccaacgtaatcacggacggtaaaatccgctacgctgtaatacaggctgttgatagtgaaatcgcggcgctgggcgtcttcttcgatggagccgaaaatgttgtcgcgcagcaacatgccgttttgcccgcgttgggaggtcgtgcggtcgctgacgttaccttcgtggtgtccacggaaggtcgcaacttcgataatctccgggccaaacattacatgagccagacggaaacggcgacccaccaggcggcagttacggaacagtttgcgcacctgctcaggcgtggcgttagtggttacgtcaaaatctttcggctttttgccaagtaacaggtcgcgcacgccgccgccaaccagccaggcttcgtatcccgctttattgagcctgtacattaccttcagggcattttcactgatatctttgcgggaaatagcatgctgctcacgcgggatcaccgtcacctgtggacgggcgactgcctgttcagcctcgctttcctcgcggcttagcaccttgcggcaaaaattagcgactcgggtaaaaatagtacacctcggtagtgtcaaacatcattcaggacaaaaaaatagcggctaatcatagctcagcaactcgcattactgaatgtactatttacaattgcgctctcgggcacggcggtaagccgccagtttttgacggcactctgaaggatttgctcgacgctgaaatcctgccagtgtgcttctgcctgctgccccagaaattgaagtgccgcgattagtaccgggcgtggatcgcctttcggcaacgcaggcgcatgattctgcttggaaagtttagcgccttgtggattaagcgccagcggcagatgaatgtaatctggcactttccagccaaaaagctggtacaggctgatttgccttactgttggttcaatcagatcagccccacgcactatttctgtaacgccctggaaatgatcatcaaccacaacagccaggttgtaggcgaacaacccatcacggcgatgaatgataaaatcttcccgtgccagtttttcgtcggcgtgaataatgccgcgcagctggtcagtaaattgcgtgaccggatgctgctggcggatacgcactgcggcgttgtctggtccatgatgcaacacccggcaatgaccgtcgtaaataccgccaatgctttgaatacgcgcacgcgtacaggtgcagtaataacttagtccttgttcatgtaaccaggcgagtgcttcacgataggcgtcgtgacgttggctttgccagagaacatcgccgtcccagtgcagaccgtaatgttccagctggcgcaggatagtttctgcggcaccgggaacttcacgaggcgggtcgatatcttctatgcgtaccagccagcgaccttgccgggcgcgagcctgcaaatagctgccgagcgcggcgatcagagagccaaaatgaagctcgccggaaggagagggggcgaagcggccaatatactgtgtgtctgtcatctctttgaacaaaaaataaggcgggagcatttcccgcctgtggtaaacgtgatggaacggctgtaattagccagccatctgtttttcgcgaatttcagccagcgttttgcagtcgatgcacagatcggctgtcgggcgcgcttccagacggcgaataccaatttcaacaccgcaggattcgcagtagccgaaatcttcgtcttccacttttttcagcgtcttctcgatctttttgatcagcttacgctcgcgatcgcggttacgcagttcgaggctgaactcttcttcctgggctgcacggtctaccgggtccgggaagttggctgcttcatcctgcatatgtgtaacggtgcgatcgacttcatccctgagttgattacgccatgcttccagaatacgacggaagtgcgccagctgggcttcattcatatactcttcgcccggcttctcctgatatggttccaccccagcgatggcgagaatactcagggagcttgttttacggttttgcccttcttgcatgttgcttctccttaacacgcactatcgatccccatgttcgggggaaaaatgaggccgctataaatagcagatgcttttccggatagcaattatctaaacgtaacacttgacaactgtgtgaggaaaagcgtatttgcgcacgcgaccagaatgtaaattaaccagttacttactttattacaatgtaaccggcagactttttttaagagccatgccttcagcagaaatttccgctttgtaagccagaatttctacccccctctgttgagcttcactcaatagttgcgcgtatttctcatcgatgtggcgcgcgggactaaaccgtgtaatggcactatgcagcacggcgaaaaagataaccgcacgctggccttcagccgctacgctcatcaactcccgaaggtgtttctgacctcgttcagtgaccgcatcgggaaaatatccctgttcgttctccgctaacgtaacgcttttcacttcaatatagcagtctggacggctatccgcctgcaacataaagtcaatacggctgcgttctgcgccgtattttacttcgcttttcaggctgctatagccactcagttcactaatactttcattaaggatagcctctttcgtcaacctgttagcccaaagcgtgttgacgcaaataaatgcgccgctctggctttgagttaattcccaggtgtgtgggtatttccgtttggtgttgtcactagtgctataccagacggtatcgccaggcgttgcacaaccggtcatcgcacccgtattcgggcagtgtagcgttaattcgcgaccatcgggtgtgatcacatcggctaaaaaacgtttgtaacgctgaattagcgtcgcgcgctgtagagggggagaaaattccattgcgacaatccttgttattgcgttagcgcccagcgttttagcggcgtgtagcgtgtgcgtccacgggcaaagctggaggcgtaaagggtgaactccgtcaccgcatagctccagttaaaacctggcggcgggattgtcaccgcctcgctggcgtcgcgcaataaggtaatatgtggatgaaacggacgattgctttgaaaacaaccgctgcgggcagcctgactacggagcatattcgccagctggattaagccgcgtggcggctgacgcatccctaaccacaccacacggctacgcagccattgtccggcgtcatcaagcgtgagtgtgaaaccaggttgacgaatccgtccggctaaaagagaaagcgccttctctttctcggcgctcacttcgcctaaaaatgccagagtcagatgcaaattatcggcggcgaccggacgtcccgcctcaggtgggaagtgtgtggcgcgccaatggataatctgttcgcggatttctgcaggtaagtcgatagcaaagaacagacgttgcggttcagacatgtgaggcactcggttatgaattaccgcgatgctacaatgtggcgcgaagaatgttaaccctctggagcgttttgtgagcagcttgcccgttgctgccgtcttacctgaattacttaccgctctcgattgtgcgccgcaggtattattaagtgcgccgaccggggccgggaaaagtacctggctgccgctgcaactgctggcgcatcccggcattaacgggaaaattatcctgctggagccgcgtcgtctggcggcgcgtaacgtcgcgcaacggctggcggagctgcttaacgaaaagccaggcgataccgttggctaccggatgcgtgcgcaaaactgcgtcgggccgaatacccgcctggaagtggttaccgaaggcgtgctgacgcgcatgatccagcgtgacccggaactgagcggtgttggactggtgatccttgatgaatttcatgagcgcagcttgcaggcggatttggcgttggcgctgttactcgatgtgcaacaaggtctgcgtgatgaccttaaactgctgattatgagcgctaccctggacaacgaccgcttgcagcaaatgctgccagaagcgcctgtcgtcatcagtgaagggcgcagctttccggttgaacgccgttatttaccgctgcccgcgcatcagcgttttgacgatgccgttgcggtagccaccgctgaaatgctgcgtcaggaaagcggaagtttactgttatttttacctggcgtcggagaaattcagcgtgtgcaggaacaactggctagccgcatcggcagtgatgtattgctctgcccgctgtatggcgcgttgagcctgaacgatcagcgaaaagcgatcctcccggcaccgcaagggatgcgcaaagtggtgctggcgaccaatattgctgaaaccagtttaaccattgaaggtattcgtctggtggtggattgtgcccaggagcgtgtggcgcgttttgatccgcgcacggggcttacgcgactgattactcaacgcgttagccaggcatccatgacgcagcgtgccgggcgcgccgggcgtctggagccgggtatcagcctgcatttaatcgccaaagaacaagcagaacgcgccgcggcgcaaagtgaaccggagatcttacaaagcgatctttccggtttgctgatggaattactgcaatggggatgcagcgatccggcgcagatgagctggctggatcaaccgccagtagtgaatctactggccgcgaaacgtctgttacaaatgctgggggcactggagggtgaacggcttagtgcgcaagggcaaaaaatggcagcgctgggtaacgatccgcgtttagcggcaatgctggttagcgcgaagaacgacgacgaagctgctaccgcggcaaaaattgccgccattctcgaagagccgccacggatgggcaatagtgacctgggcgtggcgtttagccgcaatcaaccagcctggcagcaacgtagtcagcaactgttaaaacgcttaaacgtacgtggcggtgaggcagacagtagccttatcgcgccgctacttgccggggcgtttgccgatcgcattgctcgtcgccgtgggcaagatggacgctatcaactggcaaacggcatgggagcgatgctcgatgccaacgacgcgctaagccgccacgaatggttgatcgcaccgttattattgcagggcagcgccagcccggatgcgcggattttactggcgctgctggtcgatattgatgagttagtacaacgctgcccgcagctggtacagcagtctgacactgtggagtgggatgacgcgcaaggtacgctgaaagcctggcgtcggctacaaatcggtcagttgacggtgaaagtgcagccgctggcgaaaccgagtgaagacgagttgcatcaggcgatgcttaatggcatccgtgataaaggtttaagcgtgctcaactggacggcggaagcggaacagctacgcttgcgtttgttatgcgccgcaaagtggttgccggaatatgactggccagcggttgatgatgaaagtttattggcagcgctggaaacgtggctgctgccacatatgactggcgtacatagtctacgcggcctgaaaagtctcgacatttatcaggcactacgcggattacttgattggggaatgcagcaacgtctggatagtgaattgcctgcgcattacactgtgccgacgggaagccggatcgccattcgttatcatgaagataacccgcccgcgctggcggtgagaatgcaagagatgtttggcgaggccaccaatccgacgatcgcccaggggcgcgtgccgctggtgctggagttgcttagtcctgcccaaaggccattacaaatcacacgagatttgagcgacttctggaaaggagcgtaccgtgaggtgcaaaaagagatgaaagggcgttatcccaaacatgtctggccggacgacccggcaaatactgcaccgacgcgacggacgaaaaagtatagctaaggttggttttctccctctccctgtgggagagggccggggtgagggcatcagcgcgcacgttcaccctcaccctaaccctctccctcaagggagaggggaccgatcgagcacaaattttgagagatatcttcttctgtcttgtaacagaagaacagaaaatcgggcttttgcgcctgaatattgcggagaaaaagcatggccgggaatgaccgcgagccaattggacgcaaagggaaaccgacgcgtccggtcaaacaaaaggtaagccgtcgtcgttacgaagatgacgatgattacgacgattatgatgactatgaggatgaagaaccgatgccgcgcaaaggtaagggcaaaggcaaagggcgtaagcctcgtggcaaacgcggctggctatggctactgctaaaactggctatcgtttttgccgtgctgatcgccatttacggcgtttatctcgatcaaaaaattcgtagccgtattgatggcaaggtctggcaactgcctgcggcagtttatggccgaatggtcaatcttgagccagacatgaccatcagcaagaacgagatggtgaagctgctggaggcgacccagtatcgtcaggtgagcaaaatgacccgtcctggcgaatttaccgtgcaggccaacagcattgagatgattcgccgtccgtttgatttcccggacagtaaagaaggacaggtgcgcgcgcgtctgacctttgatggcgatcatctggcgacgatcgtcaatatggagaacaaccgtcagttcggtttcttccgtcttgatccgcgtctgatcaccatgatctctagcccaaacggtgagcagcgtctgtttgtgccgcgcagtggtttcccggatttgctggtggatactttgctggcgacagaagaccgtcatttttacgagcatgatggaatcagtctctacagtatcggacgtgcggtgctggcaaacctgaccgccggacgcacggtacagggtgcgagtacgctgacgcaacagctggtgaaaaacctgttcctctccagcgagcgttcttactggcgtaaagcgaacgaagcttacatggcgctgatcatggacgcgcgttacagcaaagaccgtattcttgagctgtatatgaacgaggtgtatctcggtcagagcggcgacaacgaaatccgcggcttcccgctggcaagcttgtattactttggtcgcccggtagaagagctaagcctcgaccagcaggcgctgttagtcggtatggtgaaaggggcgtccatctacaacccgtggcgtaacccaaaactggcgctggagcgacgtaatctggtgctgcgtctgctgcaacagcaacagattattgatcaagaactctatgacatgttgagtgcccgtccgctgggggttcagccgcgcggtggggtgatctctcctcagccagcctttatgcaactggtgcgtcaggagctgcaggcaaaactgggcgataaggtaaaagatctctccggcgtgaagatcttcactacctttgacagcgtggcccaggacgcggcagaaaaagccgccgtggaaggcattccggcactgaagaaacagcgtaagttgagcgatcttgaaactgcgattgtggtcgtcgaccgctttagtggtgaagttcgtgcgatggtcggaggttctgagccgcagtttgcgggctacaaccgtgcgatgcaggcgcgtcgtagcattggttcccttgcaaaaccagcgacttatctgacggccttaagccagccgaaaatctatcgtctgaatacgtggattgcggatgcgccaattgcgctgcgtcagccgaatggccaggtctggagtccgcagaatgatgaccgtcgttatagcgaaagcggcagagtgatgctggtggatgcgttgacccgtagcatgaacgtgccgacggtaaatctggggatggcgctggggctgcctgcggttacggagacctggattaaactgggcgtaccgaaagatcagttgcatccggttccggcaatgctgctgggggcgttgaacttaacgccaatcgaagtggcgcaggcattccagaccatcgccagcggtggtaaccgtgcaccgctttctgcgctgcgtagcgtaatcgcggaagatggcaaagtgctgtatcagagcttcccgcaggcggaacgcgctgttccggcgcaggcggcgtatctgacactatggaccatgcagcaggtggtacaacgcggtacgggtcgtcagcttggggcgaaatacccgaacctgcatctggcagggaaaacagggactaccaacaataacgtagatacctggtttgcgggcattgacggcagcacggtgaccatcacctgggtcggccgtgataacaaccagccgaccaaactgtatggtgccagcggggcaatgagcatttatcagcgttatctggctaaccagacgccaacgccgctgaatcttgttccgccagaagatattgcagatatgggcgtggactacgacggcaactttgtttgcagcggtggcatgcgtatcttgccggtctggaccagcgatccgcaaagcctgtgccagcagagcgagatgcagcagcagccgagtggcaatccgtttgatcagtcttctcagccgcagcaacagccgcaacagcaacctgctcagcaagagcagaaagacagcgacggtgtagccggttggatcaaggatatgtttggtagtaattaacatctaagcgtgaaataccggatggcgagttgccatccggtaaaataacatcccatctaagatattaaccctttcttttcatctggttgtttattaacccttcaggaacgctcagattgcgtaccgcttgcctgtaagactcaatgtaagccgtgccaaaatatgatggctaggacgagctagaacccgccagcgtttcgaatattatcttatctttataataatcattctcgtttacgttatcattcactttacatcagagatataccattccatataacggccctgtacgcctggacggataaagcgtttacgcgacaacggatgcccgatgcgacgctggcgcgtcttatcgggcctacaaacggccccgaatcgtaggtcggataaggcgttcacgccgcatccgacaaaccatgctggatcacaacttcgcaaacacccgacgtgcagcatcgatggtgttattgatatcttccatgctgtgcgccacggacataaagcccgcttcaaacgcactcggtgccaggtaaacaccttcgtccagcatcatatggaagaaacgcttaaagcgttccacgtcacaggccatcacatcctgatagcacgtcacggactcggcgtcggtaaagaaaataccgaacatgccgccaacgtggttaacgaccagcggaattccggcttcttctgccgcttccagcagaccttctgccagacgtgttgtcagctcatccagcgtttcgtgaacgcccggctgcgcgacttcattcagacaggcgaaacccgctgccatcgcaatcgggttaccggaaagcgtacccgcctgatagaccggacccgtcggggccagcgcatccattacatcacgacgaccaccgaatgcgcctaccggcattccaccgccgatgattttgccgaggcaggttaaatctggcactacgccgtaataatcctgtgcgccagctagcgctacgcggaaaccggtcatcacttcatcgatgatcagcaacgcgccaaattcgtcgcacagcgcgcgcagacctggcaggaactctggcagcggcggaacacagttcatattgcctgccaccggctcgacgataatacaggcaatctcttgcgggtattgctcaaatgcggcgcgtacagaagccagatcattataagtacaggttaaggtatatttggcgaaatctgccggaacgcccgggctgtttggctggcctaacgtgagtgcgccagaaccggctttcaccagcaggcagtcagcgtgaccatggtaacacccttcaaatttaataattttgtcgcgaccggtaaaaccacgggccaggcggatggcgctcatggtcgcttcagtgccggagttcaccatgcgcaccatatccatggtcgggaccagttcggtcaccagttgcgccattttcacttccatttcggttggtgcaccaaagcttaaaccacgctcggcggcttcaatcacggcattgcggattgccggatggttatggcccagcaccatcggcccccaggaaccgacataatcgatataggctttgccatcaacatcgtacagataagcgccgtccgctttttcgataaacagtggagtgccgcccacgccagtaaaggcgcgaacaggggagttcacaccgccagggatcagctcgcgcgctgcgctgtaaagattttcagacttactcatggagggttcctgattcgtagaaaaagtgaatggctgctattctatgttattcataacaagttaaatactcgtcaaacatcaggctgcttgtactggtgcaatcctgatttcttagagtataaaagttttgtgcatttgaaacattacgctttgcaaaggattttcatggaacgtgcgagtaaaatgccgtcatcttatttgtatgaccaataagtgatcattggatgaaaactgatactccctctttagaaacaccgcaggccgcgcgcctgcgacgcagacaactgattcgccaacttcttgagcgcgataaaaccccgttagccattttgtttatggcggcagtcgtcggcacgcttgttgggctggcagcggttgcttttgacaaaggtgtcgcctggttgcagaaccaacgtatgggggcgctggtacatactgctgataattatccgcttctgttaaccgtcgcttttctctgtagcgcggtgctggcgatgtttggctactttttggtgcgcaaatacgcgccggaagcaggtggtagcgggatcccggaaattgaaggggcgctggaagatcaacgtcccgttcgctggtggcgtgtattgccggtgaagttctttggcgggctggggacactcggcggaggcatggtgttggggcgcgaagggccaaccgtgcagatcggcggtaacattggccgtatggtgcttgatattttccgcctgaaaggtgacgaagctcgccatacgctgctggcaaccggtgctgctgcggggctggctgcggcctttaacgcgccgctggcgggtattttgtttattatcgaagagatgcgtccgcagtttcgctatacgttaattagcattaaagcggtatttattggtgtcattatgagcaccattatgtaccggatttttaatcatgaagttgcgttgattgacgtcggtaaactttctgatgcgccgcttaatacgctgtggctttatctgatcctcggtattatttttggcattttcggccctatttttaataaatgggtgctggggatgcaggatttgctgcaccgtgtgcacggcggcaatattaccaaatgggtgctaatgggcggtgcgattggcggtctgtgtggattgctggggtttgtggcaccagcaacgagcggcggcggttttaacctgattcctatcgctaccgcggggaatttcagcatgggaatgctggtgtttatcttcgtcgcgcgggtcattaccaccttactctgcttctcttccggcgcgccgggcggtatttttgccccgatgctggcgctgggtactgtgctgggaaccgctttcggaatggttgccgttgagctgtttccgcaatatcaccttgaggcggggacgtttgctattgccggaatgggggcattactggcggcatctattcgcgcgccgttaacggggatcattctggttctggagatgaccgataactaccagctcattttgccaatgattattaccggtcttggcgcaacactattagcgcaatttaccggcgggaaaccgctatacagcgcgattcttgcgcgcacgctggcaaaacaggaagctgagcaactggcgcgaagcaaggccgcaagtgccagcgagaatacttgaacgaaataccagggtattagataatggcgattattattgggttagaatttgcccaattgccgatgtcgtttggagcaaaatatgagtgatgacgtagcactgccgctggagtttaccgacgcagcagccaacaaagttaaaagcctgatcgctgacgaagataacccgaatctgaaattacgcgtgtatatcaccggtggcggttgcagcggcttccagtatggtttcacctttgatgatcaggtgaacgaaggcgatatgaccatcgaaaaacagggcgttggcctggtggttgatccgatgagcctgcaatatctggtcggcggttccgttgattataccgaaggtctggaaggttctcgtttcatcgtgaccaacccgaacgcgaaaagcacctgcggttgcggttcttcctttagtatctaatctgttgttcatgtgccggataaactatccggcacatcttctctcttcaacgcccattctcatccagcgcaaacgtcggtagcttaagatgccaacgaatagccgccagccgaatcaatagcgtcacgaccatgcccatcatactggctgtttccagtggtacggaaaatgtgtaataagccgtagcgtggacaataccgccgataatacaggcagttgcgtagatttctgtacgtaaaatcatggggatttcgcgggccagaacatcacgaatgatcccgccgccaacgccagtaatgacgcccatacaaaccgcgattaacggaccggcttccgcattaaaggctttattcacgccaatgccgacaaacaccgccagaccaacggcgtccagcaccggcaacatccattttggtaagcgtcttggctggcgcaccagcacgatggtcagcatgctggtgaccattgcaacgaccagatcggtgggatctttcacccaaaataccgggccgtgatccagcgccatgtcgcgaattgtcccgccgcctactgcggttaccacgcccagtaccagaacaccaaaagggtccatacgcaattttccggctaacaaaacgccggagatggcaaataccgctgtgccgactatatccagccaatagacgagcattgttcaatccccactgagcacctgaaaaggtcaggcgttaatctacctgactaagcgcattacagagctgttgtgcagcgaggataatacgtgggcttgcacgttcaaaccagtcactcgtgagaggaataacgggaattttgagctgttcaccccagtattgtttgattttaggaatttggtccggtccgcctgtaatgacaatcgcctgtgggctgcgtgctaacacctgttcgcggctaacttgcggccagggaacccggctgtctttaaagatgttttctccgccacaaacttcgagtacctggttctgaatgctctcttttccactggtaaatggcggattaatgccgaattgcagaaaaacacgttttttaggtttatcagcatattgcgctttcaattgcgcgtactgatccagcagggattgcgcggcttgttcggccttgtctggttgcggactccagggggccagttgacgtaacgcattggcaatttgttcaatgcttgtcgcatcgacccacatcacttttattcccaggctagccagctggtcaacctgccgctcggcattacctccacgccaggcaatcaccagatcgggtttcagcgcgacaatgcgttccagattcatcccctgccaggtggaaacctgctcaatcttttgcgcttgtggaggatagtcggaatagctgctgaccccaaccggcgtgatcccggcggcaaaggcaagttcagtgttggcgggagaaagcgtgatgacgcgcggcgcggcgttgagccacagtggcgcaagaaaagacagggcgaccagcgccctgaacagactcttagccatgtgcaagtttctgcaccagactctcaaccatcaggctggactgtttagcggcaacagccaggaactcatcgaagctaagatgagactgttgatcggccacgtcggagatggcgcgtacgacaacaaacgggacgttgaaattgtggcagacatgggcgattgccgtcgcttccatctctacagcaatggcctgtgggaagttgtggcggattttcgccagaccaacagaaccgttgatgaaagcgtcgccgctaacaatcaggccacgtacagcgttaagattcagttcggcaatgcaggcctcagcggcagcgatcagtttatcgtcagctttaaagcctgccggacagcctggtaactgaccgtattcataaccaaatgccgtgacatccgcgtcgtgataacgtgcttcgtcgctgacaacgatatcgcccactttcaacgttggtgccaggccaccggcagaaccggtgttaataatcacatctggcttgcagtgttccaacagcaaagtggcacccagcgccgcagcgactttaccgatgccgcttttcagaagcgcaacctcggttccattcagttggccggtatagatttcgcaaccgccgagactgatagtttgacggttttcgattttgtcacgcagcagcgtaacttcttcttccattgcaccaatgatgccgattttcatagatttactcgcgataagcccgatttgaaggcatagtttaccatgcgcttacggggaagcgtatttctcacgcgggagaggacatggcacagattgatttccgaaaaaaaataaactggcatcgtcgttaccgtagtccgcagggcgttaaaaccgaacatgagatcctgcggatcttcgagagcgatcgcgggcgtatcatcaactctccggcaattcgtcgtctgcaacaaaagacccaggtttttccactggagcgcaatgccgccgtgcgcacgcgtcttacccacagcatggaagtccagcaggtggggcgctacatcgccaaagaaattttaagccgtctgaaagagcttaaattactggaagcatacggcctggatgaactgaccggtccctttgaaagcattgttgagatgagttgcctgatgcacgatatcggcaatccgccgtttggtcattttggcgaagcggcgataaatgactggtttcgccaacgtttgcacccggaagatgccgaaagccagcctctgactgacgatcgctgcagcgtggcggcactacgtttacgggacggggaagaaccgcttaacgagctgcggcgcaagattcgtcaggacttatgtcattttgaggggaatgcacaaggcattcgcctggtgcatacattgatgcggatgaatctcacctgggcacaggttggcggtattttaaaatatacccgtccggcgtggtggcgtggcgaaacgcctgagacacatcactatttaatgaaaaagccgggttattatctttctgaagaagcctatattgcccggttgcgtaaagaacttaatttggcgctttacagtcgttttccattaacgtggattatggaagctgccgacgacatctcctattgtgtggcagaccttgaagatgcggtagagaaaagaatatttaccgttgagcagctttatcatcatttgcacgaagcgtggggccagcatgagaaaggtagcctctttagcctggtggttgaaaatgcctgggaaaaaagtcgcagtaatagtttaagccgcagtacggaagatcagttttttatgtatttacgggtaaacaccctaaataaactggtaccctacgcggcacaacgatttattgataatctgcctgcgattttcgccggaacgtttaatcatgcattattggaagatgccagcgaatgcagcgatcttcttaagctatataaaaatgtcgctgtaaaacatgtgtttagccatccagatgtcgagcggcttgaattgcagggctatcgggtcattagcggattattagagatttatcgtcctttattaagcctgagcttaagtgactttactgaactggtagaaaaagaacgggtgaaacgtttccctattgaaagccgcttattccacaaactcagcacgcgccatcggctggcctatgtcgaggctgtcagtaaattaccgagtgattctcctgagtttccgctatgggaatattattaccgttgccgcctgctgcaggattatatcagcggtatgaccgacctctatgcgtgggatgaataccgacgtctgatggccgtagaacaataaccaggcttttgtaaagacgaacaataaatttttaccttttgcagaaactttagttcggaacttcaggctataaaacgaatctgaagaacacagcaattttgcgttatctgttaatcgagactgaaatacatgaaaaaaaccacattagcactgagtgcactggctctgagtttaggtttggcgttatctccgctctctgcaacggcggctgagacttctagtgcaacgacagcccagcagatgccaagccttgcaccgatgctcgaaaaggtgatgcctagtgtggtcagcattaacgtagaaggtagcacaaccgttaatacgccgcgtatgccgcgtaatttccagcagttcttcggtgatgattctccgttctgccaggaaggttctccgttccagagctctccgttctgccagggtggccagggcggtaatggtggcggccagcaacagaaattcatggcgctgggttccggcgtcatcattgatgccgataaaggctatgtcgtcaccaacaaccacgttgttgataacgcgacggtcattaaagttcaactgagcgatggccgtaagttcgacgcgaagatggttggcaaagatccgcgctctgatatcgcgctgatccaaatccagaacccgaaaaacctgaccgcaattaagatggcggattctgatgcactgcgcgtgggtgattacaccgtagcgattggtaacccgtttggtctgggcgagacggtaacttccgggattgtctctgcgctggggcgtagcggcctgaatgccgaaaactacgaaaacttcatccagaccgatgcagcgatcaaccgtggtaactccggtggtgcgctggttaacctgaacggcgaactgatcggtatcaacaccgcgatcctcgcaccggacggcggcaacatcggtatcggttttgctatcccgagtaacatggtgaaaaacctgaccagccagatggtggaatacggccaggtgaaacgcggtgagctgggtattatggggactgagctgaactccgaactggcgaaagcgatgaaagttgacgcccagcgcggtgctttcgtaagccaggttctgcctaattcctccgctgcaaaagcgggcattaaagcgggtgatgtgatcaccagtctgaacggtaagccgatcagcagctttgccgcactgcgtgctcaggtgggtactatgccggtaggcagcaaactgaccctgggcttactgcgcgacggtaagcaggttaacgtgaacctggaactgcagcagagcagccagaatcaggttgattccagctccatcttcaacggcattgaaggcgctgagatgagcaacaaaggcaaagatcagggcgtggtagtgaacaacgtgaaaacgggcactccggctgcgcagatcggcctgaagaaaggtgatgtgattattggcgcgaaccagcaggcagtgaaaaacatcgctgaactgcgtaaagttctcgacagcaaaccgtctgtgctggcactcaacattcagcgcggcgacagcaccatctacctgttaatgcagtaatctccctcaaccccttcctgaaaacgggaaggggttctccttacaatctgtgaacttcaccacaactccatacatcttcatcatcctttaggcatttgcacaatgccgtacgttacgtacttccttatgctaagccgtgcataacggaggacttatggctggctggcatcttgataccaaaatggcgcaggatatcgtggcacgtaccatgcgcatcatcgataccaatatcaacgtaatggatgcccgtgggcgaattatcggcagcggcgatcgtgagcgtattggtgaattgcacgaaggtgcattgctggtacttagtcagggacgagtcgtcgatatcgatgacgcggtagcacgtcatctgcacggtgtgcggcaggggattaatctaccgttacggctggaaggtgaaattgtcggcgtaattggcctgacaggtgaaccagagaatctgcgtaaatatggcgaactggtctgcatgacggctgaaatgatgctggaacagagccggttgatgcacttgttggcgcaggatagccgtttgcgggaagaactggtgatgaacctgattcaggcagaggagaatactcccgcacttactgaatgggcgcaacggctggggatcgatctcaatcaaccgcgagtggtggctattgttgaggtcgacagcggtcagcttggcgtggacagcgcaatggcggagttacaacaactgcaaaacgcgctgactacgcccgagcgtaataatctggtggcgattgtcagcctaaccgaaatggtggtgttgaaaccggcgttgaactcttttgggcgctgggatgcagaagatcatcgtaagcgagttgaacaactgattacccgcatgaaagagtacggccagctgcgttttcgcgttagtctgggcaactattttaccggtcctggcagtattgcccgatcctatcgtacggcgaaaacgacgatggtggtgggtaaacagcggatgccagaaagtcgctgctatttttatcaggatctgatgttacctgtgttactcgacagtttgcgtggcgactggcaggccaacgaactggcgcgaccgctggcgcggctgaaaacgatggacaataacggcttgctgcgacgaacgctggcggcgtggtttcgccacaatgtgcaaccgctggcaacgagtaaggcgttgtttattcatcgtaataccctggagtatcggcttaatcgtataagcgaactgaccgggcttgatttgggcaattttgatgacaggttgctgctgtatgtggcgttacaactggatgaagagcggtaagttatgcgttaaggttgaggcggcgctggctcattcccctcagcccgaagggtagaggggaatgcccgaattaaccgtcagttcgggattatttacgcgttagtttttccagatcggcttcaatctcgctgatcttattggttacgacactctccaggtgacgtaagtcgtcgaggatcttacgcttaagatcaacttcgctgcggtcacgctggcagatttgatcaagctcatcaatgatataccgtagattcgggctgatttcctggacttctttataaccctgacccacaccatcagcgacgaccgttttacgctgacgcggatatttaaacttaacgctcttggcgaaaaactcgcctttgtctttctggaaatagattttcagaatatcgttgttggcttcctgccggaggctgtaacgatcaatttcttcaggattggtaatacccagacttttcagattgtcgtacatagcgttacctcaaaatgagtcagtaaattgtgcttattttagcatttggcctggcccgcccggctcgactgtgatcgcagaaagcctttttcttccagacttctatcatggcgtaaaaatcaaaaaattacctgctttattctggtgataaaattcacgatttacaccagttccagcatcgttacttccgggcggcagttcagacgcaaaccatacaaactgcccacgccacgggttgtgtagatgtgtctttcgccaaaggcatttaatccggcgacgtaacgtttatcttcgacaggggcaaaaggttcaccaaccaacggtacgcgcagttgcccgccgtgagtatggccgcacagcatcagatcccagggttcatcacgcatgacttctttgctgtcgggattatgcgccagcaccagtcttggcagattggcttcgctggcgggaggcggtttgcattgtccggcccataagtcaccagtgcctaccagttcgaattgcctgttcggcgtggcgatcaccgtagcctggttaaacaacaccgtgatgcccgcacttttcaacgtctcgccaattaagtgatttttttctgtaccaacagggcgatcgtggttgccgaagcaggcaaacgtcggcgcacattcggcaaggggggagagtacgtcactaaacgcgctaaaattcaggctcatatcaaataatacgtaatcgccgcccagtaatatcaaatcgggcttttgttctatgccaagagcaatcgcgtcagaaatcaggcttaaaggaacaaaacgagagtaatggagatcggccagaaaaagaattttgaatggtgctgcgttgtctttaaaaaaggcgaggcggtgacggattaattcaaaccagcctggctcacagtaatgcatataaccgaaaccactgctcgtggctatcgtcgcggcagtagcctgcaaaaatcggcggcgactaatcatcgctcatccctgcaaaaaaatcgggcagcgtcgtgctgcccgtgtgcatacttttagtcgatggtacgcagcagttcgttaatgccgactttgccgcgagttttcgcgtcaactttcttaacgataaccgcacagtagaggctgtatttgccatctttactcggcagattaccactaacaaccacagaccccgccggaacgcgaccgtagtggatttcgccggtttcacggtcgtaaatacgggtgctctgaccaatgtatacgcccatggaaatgacggaaccttcttcgacaatcaccccttcaaccacttcagagcgcgcgccgatgaagcaattatcttcaatgatggttgggttagcctgcagcggttccagcacgccgccgatgcccacgccaccggaaaggtggacgtttttaccaatctgcgcacaagaaccgacggtcgcccaggtatcaaccatggtgccttcatcaacatatgcgccgatgttgacgtaagacggcatcagcacggtgttacgggcaataaacgcaccctgacgtaccgccgctggtggcacaacgcggaagccttctttctggaaacgtgcttcgtcgtagtcggcgaatttcatcggcactttgtcgaagtagcggctttctgccccttcgatcacctgattatcattaatacggaaagagagcagcaccgcttttttcaaccactgatgcgtcacccactgaccgtcaattttttccgctacacgcagtgcgccggaatccagcagggcgatcacctgatttaccgcttcgcgggtaacggtgtctgcattggctggcgtgatctcggcacggcgttcaaaagcggtttcaataatgttctgtaactgctgcattgttaaactcttttcatatcagtaaacacatcaccctttatcgtttggattgagggcctctgtcaaccgctgatgcacttcctgctgcaactcgttattaagcgcacgccggtcagcggtggcaattatgaataaatcttctactcgctcgccaatggttgtaattcgggcaccatgaaggctaattcccagatcggcaaaaattttcccgactcgcgccagcagtccaggttggtcgagggcgatcagttcgaggaagcttttgcggtcggtatgggtcggcaaaaacgttacttcggtttcaacagtaaaatggcgtaatttggcgggttggcgacggggctgcggtggctgccagctactttgcgtcagtacttgctccagaccaaaccgaataacctcatgacgatctgcggacagcgggttgccatcgggttccagcacgataaaggtatccatcgccataccgtcgcgagtggtgaaaatttgtgcgtcgtgaacacttaaattgcggcggtctaattcggcacagacggcggcaaacagataagggcggtccgggctccagataaaaatctcggtgcctccacgcgtagcctgcgggctaagcaataccagcggtttgcttaaatcatgctgtaataaatggcgggcatgccaggccagttgatttgggctatggcggacaaaatagttagcacgacagcgactccaaatttggtgcagcgcctcttcgtcgatgttatccatgcgcagtagtgccagtgcctggagttggtgatggcgaacccgttcgcgcatatccggcgtgttttgcattccgcgtcgtagctgcttttcggtggcaaagtagagctcacgcaacagactttgcttccagctattccacagcgtttcgttggtggcgcaaatgtcagccacagtcaggcataccagatagcgcagacgattttccgtttgcacttcttcggcaaactgcttgatgacttccgggtcctgaatatcgcggcgttgggcggtcacgctcatcaacaggtgctggcgaaccagccaggcgaccagctgtgtttcgcgactgttcagcccgtggagttcggcaaaatgcactacatcctgagcaccgagaatggagtggtcgccgccgcgtcctttggcgatatcgtgaaacagcgcggcgatgaaaatcagctcagtactcggcaggcgcggccagacgtccacacacaacggatggcgctggcgcgtttcttcactggcaaaactctccagtttcagcatcacgcggatagtatgttcatccaccgtgtaggcgtggaacagatcaaactgcatctgcccgacgatatggctccattgcggcatatacgcgccgagcacgctatggcgatgcattggcaatagcccgcgccgcaccgctccggggtgacgcagaatgctcaaaaacagttttcgtgcttccggaatattacacagcggttgttgcagatggcgacgggcatggcgtaactggcgcagcgtggtggagtaaatgccggtgatcgcactgttgtgcaccatggtgtagaacatacgcaagatggcttccggctggcgcataaatagtgtttcatcacgcaggtcgattagcgtaccgcgtagctgaaactcatcgtcgattggacgtggtttttcgtcggcgggaagggcgaggatggcttcatcgaacagttgcagcagcatctggttgagttcactgacgcggcgtgtaacgcggaagtaatccttcatcatccgctcgaccggttcgttaccttcaccactgtaattcagacgctgggcgacgctaagctggcgatcgaataacaggcgattatcgtaacggctgacgaccagatgcagggcaaagcgaatacgccacaatatatgcagacattcgtttaattccgcccgctccgcactggttaagaagccaaacccgaccatttcatccaggcttgttgcgccaaaatgacggcgggccacccattgcagagtgtggatatcgcgcaagccgccagggctgcttttgatgtctggttcaaggttgtagctggtgccatggtaacgctgatggcgctggttctgttcttcaactttcgccgcgtagaacttgtcggaaggccagaatccttcgctgaaaatatgtttttgcagttcgaggaacagcgcaacatcgccaattaataagcgggattcgattaaattggtggcgacggttaaatcgcttaacccttccagcatgcactcttcaagcgtgcgcacgctatgaccgacttccagctttacatcccagagcagcgttaacagctcgcccactttttgcgcctgatcgtccgggagctttttacggcttaaaatcagtaaatcgacgtcactaagtggatgcagctcgccacgaccgtagccaccgacggcgaccaatgccaggtcggcaatctggctgaatcccgcttcaatccataatcgttgcaggagctggtcgataaactcggtgcgcgcctcaatcaactgttctgcagagatcccattgtcaaaggcatcacccagccaacgctggaaagtatcgatatgggcttttatcccaccgacggttaattcatcacggggccagacgcatggattttgcggttgaccgggcagggtggggagagcggtgtttgcgtactgttctggaagggtattcattgtgcgccacccataagattaaattatcgcattaaaaaagccggcattcgccggcttcatcttattcgtcgtggctgattatcgccgggatggtgtcatccttgcgtagcgtcagaatttcgcagccgttatcagtcaccacaatagtatgctcatattgtgcagacaagctgcgatctttggtttttaccgtccagccatctttcatggtgcggatctcttttttacccgcgttgaccattggctcgatggtgaacgtcatcccaggtttcagtacgacgttggtttcacgggagtcatagtgcagcacctgcggttcttcatggaagccgcgaccaataccgtgtccgcaatattcacgaacgacggagaagccttctgcttcgacaaatttctgaatcgccgcaccgatttcgcgcagattaatgcctggttttaccatgcgtagcgccaggtacaggctttcttgcgtgatgcggcacagacgttcgcccatgatggtcggcttaccgacgataaacattttgctggtatcgccgtggaaaccatctttgattacggtgacatcaatgttaacgatatcgccatctttcagcagcttagcatcgtccgggataccgtggcacaccacttcattaatagagatgcaaacggatttcggatagccgtgatagccgaggcaggcagaaaccgcgtgttgttcattaacaatgtaatcattacagatgcgatccagctcgccggtgctgacgcccggtttaacatacggttcgatcatctccagcacttcggcagccagtcggccagcgacgcgcattttttcgatatcttctggggtcttgatagagatagccattaattctgtccatcagcgtcggtgataccgacaatatatatgtaagtgccgtcaatggtatcacacccgggcaaattgagaatcattctgaatttcgccaaacgtgccactgaaggttttctataatagaaaattcgacgtctgatgctgtacacagcgccaacaattattggtgtccacgacgtatttgtggtataaagcgcgccggacttccgatccatttcgtatacacagactggacggaagcgacaatctcactttgtgtaacaacacacacgtatcggcacatattccggggtgccctttggggtcggtaatatgggatacgtggaggcataaccccaacttttatatagaggttttaatcatggcaactgtttccatgcgcgacatgctcaaggctggtgttcacttcggtcaccagacccgttactggaacccgaaaatgaagccgttcatcttcggtgcgcgtaacaaagttcacatcatcaaccttgagaaaactgtaccgatgttcaacgaagctctggctgaactgaacaagattgcttctcgcaaaggtaaaatccttttcgttggtactaaacgcgctgcaagcgaagcggtgaaagacgctgctctgagctgcgaccagttcttcgtgaaccatcgctggctgggcggtatgctgactaactggaaaaccgttcgtcagtccatcaaacgtctgaaagacctggaaactcagtctcaggacggtactttcgacaagctgaccaagaaagaagcgctgatgcgcactcgtgagctggagaaactggaaaacagcctgggcggtatcaaagacatgggcggtctgccggacgctctgtttgtaatcgatgctgaccacgaacacattgctatcaaagaagcaaacaacctgggtattccggtatttgctatcgttgataccaactctgatccggacggtgttgacttcgttatcccgggtaacgacgacgcaatccgtgctgtgaccctgtacctgggcgctgttgctgcaaccgtacgtgaaggccgttctcaggatctggcttcccaggcggaagaaagcttcgtagaagctgagtaataaggcttgataactcccccaaaatagttcgagttgcagaaaggcggcaagctcgagaattcccgggagcttacatcagtaagtgaccgggatgagcgagcgaagataacgcatctgcggcgcgaaatatgaagggggagagcccttatagaccaggtagtacacgtttggttagggggcctgcatatggccccctttttcacttttatatctgtgcggtttaatgccgggcagatcacatctccgaggattttagaatggctgaaattaccgcatccctggtaaaagagctgcgtgagcgtactggcgcaggcatgatggattgcaaaaaagcactgactgaagctaacggcgacatcgagctggcaatcgaaaacatgcgtaagtccggtgctattaaagcagcgaaaaaagcaggcaacgttgctgctgacggcgtgatcaaaaccaaaatcgacggcaactacggcatcattctggaagttaactgccagactgacttcgttgcaaaagacgctggtttccaggcgttcgcagacaaagttctggacgcagctgttgctggcaaaatcactgacgttgaagttctgaaagcacagttcgaagaagaacgtgttgcgctggtagcgaaaattggtgaaaacatcaacattcgccgcgttgctgcgctggaaggcgacgttctgggttcttatcagcacggtgcgcgtatcggcgttctggttgctgctaaaggcgctgacgaagagctggttaaacacatcgctatgcacgttgctgcaagcaagccagaattcatcaaaccggaagacgtatccgctgaagtggtagaaaaagaataccaggtacagctggatatcgcgatgcagtctggtaagccgaaagaaatcgcagagaaaatggttgaaggccgcatgaagaaattcaccggcgaagtttctctgaccggtcagccgttcgttatggaaccaagcaaaactgttggtcagctgctgaaagagcataacgctgaagtgactggcttcatccgcttcgaagtgggtgaaggcatcgagaaagttgagactgactttgcagcagaagttgctgcgatgtccaagcagtcttaattatcaaaaaggagccgcctgagggcggcttctttttgtgcccatcttgtaaattcagctaacccttgtggggctgcgctgaaaagcgacgtacaatgtcgctagtattaattcatttcaatcgttgacagtctcaggaaagaaacatggctaccaatgcaaaacccgtctataaacgcattctgcttaagttgagtggcgaagctctgcagggcactgaaggcttcggtattgatgcaagcatactggatcgtatggctcaggaaatcaaagaactggttgaactgggtattcaggttggtgtggtgattggtgggggtaacctgttccgtggcgctggtctggcgaaagcgggtatgaaccgcgttgtgggcgaccacatggggatgctggcgaccgtaatgaacggcctggcaatgcgtgatgcactgcaccgcgcctatgtgaacgctcgtctgatgtccgctattccattgaatggcgtgtgcgacagctacagctgggcagaagctatcagcctgttgcgcaacaaccgtgtggtgatcctctccgccggtacaggtaacccgttctttaccaccgacagtgcagcttgcctgcgtggtatcgaaattgaagccgatgtggtgctgaaagcaaccaaagttgacggcgtgtttaccgctgatccggcgaaagatccaaccgcaaccatgtacgagcaactgacttacagcgaagtgctggaaaaagagctgaaagtcatggacctggcggccttcacgctggctcgtgaccataaattaccgattcgtgttttcaatatgaacaaaccgggtgcgctgcgccgtgtggtaatgggtgaaaaagaagggactttaatcacggaataattcccgtgatggataaataagggtaagattccgcgtaagtatcgcgggggcgtaagtctggttataaggcgttattgttgcaggcagtttggtcacggccagcgcgcagcaaccggagcgtacaaaagtacgtgaggatggcgagcactgcccggggccaaaatggcaaataaaatagcctaataatccagacgattacccgtaatatgtttaatcagggctatacttagcacacttccactgtgtgtgactgtctggtctgactgagacaagttttcaaggattcgtaacgtgattagcgatatcagaaaagatgctgaagtacgcatggacaaatgcgtagaagcgttcaaaacccaaatcagcaaaatacgcacgggtcgtgcttctcccagcctgctggatggcattgtcgtggaatattacggcacgccgacgccgctgcgtcagctggcaagcgtaacggtagaagattcccgtacactgaaaatcaacgtgtttgatcgtagtatgtctccggccgttgaaaaagcgattatggcgtccgatcttggcctgaacccgaactctgcgggtagcgacatccgtgttccgctgccgccgctgacggaagaacgtcgtaaagatctgaccaaaatcgttcgtggtgaagcagaacaagcgcgtgttgcagtacgtaacgtgcgtcgtgacgcgaacgacaaagtgaaagcactgttgaaagataaagagatcagcgaagacgacgatcgccgttctcaggacgatgtacagaaactgactgatgctgcaatcaagaaaattgaagcggcgctggcagacaaagaagcagaactgatgcagttctgatttcttgaacgacaaaaacgccgctcagtagatccttgcggatcggctggcggcgttttgctttttattctgtctcaactctggatgtttcatgaagcaactcaccattctgggcagcaccggcagcattggttgcagcacgctggacgtggtgcgccataatcccgaacacttccgcgtagttgcgctggtggcaggcaaaaatgtcactcgcatggtagaacagtgcctggaattctctccccgctatgccgtaatggacgatgaagcgagtgcgaaacttcttaaaacgatgctacagcaacagggtagccgcaccgaagtcttaagtgggcaacaagccgcttgcgatatggcagcgcttgaggatgttgatcaggtgatggcagccattgttggcgctgctgggctgttacctacgcttgctgcgatccgcgcgggtaaaaccattttgctggccaataaagaaagtctggttacctgcggacgtctgtttatggacgccgtaaagcagagcaaagcgcaattgttaccggtcgatagcgaacataacgccatttttcagagtttaccgcaacctatccagcataatctgggatacgctgaccttgagcaaaatggcgtggtgtccattttacttaccgggtctggtggccctttccgtgagacgccattgcgcgatttggcaacaatgacgccggatcaagcctgccgtcatccgaactggagcatggggcgtaaaatttctgtcgatagcgctaccatgatgaacaaaggtctggaatacattgaagcgcgttggctgtttaacgccagcgccagccagatggaagtgctgattcacccgcagagtgtgattcacagtatggtgcgctatcaggacggcagtgttctggcgcagctgggggaaccggatatgcgtacgccaattgcccacaccatggcatggccgaatcgcgtgaactctggcgtgaagccgctcgatttttgcaaactaagtgcgttgacatttgccgcaccggattatgatcgttatccatgcctgaaactggcgatggaggcgttcgaacaaggccaggcagcgacgacagcattgaatgccgcaaacgaaatcaccgttgctgcttttcttgcgcaacaaatccgctttacggatatcgctgcgttgaatttatccgtactggaaaaaatggatatgcgcgaaccacaatgtgtggacgatgtgttatctgttgatgcgaacgcgcgtgaagtcgccagaaaagaggtgatgcgtctcgcaagctgaggataatccggctacagagagtcgcgctatttgttagcgtagggcttcagtgatatagtctgcgccatctgatcgtaagtagttggctttataaggtcagatatgccgtggttttacacggcttttttttgtataggcttcagtattcctgagtaccgtaaaccctgtcagggaataaaaaacgcgtgatgttgtctgctactcaaccacttagcgaaaaattgccagcgcatggctgccgtcatgttgcgatcattatggacggcaatggccgctgggcaaaaaagcaagggaagattcgtgcctttgggcataaagccggggcaaaatccgtccgccgggctgtctcttttgcggccaacaacggtattgaggcgttaacgctgtatgcctttagtagtgaaaactggaaccgaccagcgcaggaagtcagtgcgttaatggaactgtttgtgtgggcgctcgatagcgaagtaaaaagtctgcaccgacataacgtgcgtctgcgtattattggcgataccagtcgctttaacagccgtttgcaagaacgtattcgtaaatctgaagcgctaacagccgggaataccggtctgacgctgaatattgcggcgaactacggtggacgttgggatatagtccagggagtcaggcaactggctgaaaaggtgcagcaaggaaacctgcaaccagatcagatagatgaagagatgctaaaccagcatgtctgtatgcatgaactggcccctgtagatttagtaattaggactgggggggagcatcgcattagtaactttttgctttggcaaattgcctatgccgaactttactttacagatgttctctggcccgatttcgatgaacaagactttgaaggggcgttaaatgcctttgctaatcgagagcgtcgtttcggcggcaccgagcccggtgatgaaacagcctgatgggggtcgcttttgctgaagtatcgcctgatatctgcttttgtgttaatacccgtcgtcatcgcggcgttgtttctgttgccgccggtggggttcgccattgtaacgctggtggtctgcatgctggcagcgtgggaatggggacagcttagcggttttaccactcgtagccagcgagtatggttggcggtgttatgcgggttattgttggcgctgatgctttttctgttgccggaatatcaccgaaatattcatcaaccgctggttgaaatcagtctttgggctagcctgggttggtggattgtcgcgctattgctggtgctgttttacccaggttccgcagcaatctggcgtaactctaaaacattgcgccttatttttggcgtgctaaccattgttcccttcttctggggcatgctggcgttacgggcctggcactatgacgagaatcattacagtggcgcaatatggctgctctatgtcatgatcctggtatggggcgctgactccggcgcatatatgtttggcaaattgtttggtaaacataagctggcaccgaaggtttctccgggtaaaacctggcaaggctttatcggtggactcgctactgcagcggtaatcagttggggttatggcatgtgggcgaatctcgacgtcgctcccgtcaccttactcatttgctctattgtcgcagcgttagccagtgtgctcggcgatctgaccgagagtatgtttaagcgtgaagcaggaattaaggacagcggtcatttaattccaggacacggtggtattttagatcgtattgatagcctgacggctgcggtaccggtctttgcttgcttgttgttactggtattcaggacgctttaacggaaggtaatatgctgagttttctctgggatttggctagcttcatcgttgcactgggtgtacttatcaccgtgcatgaatttggtcatttctgggttgcccggcgttgtggtgttcgcgttgagcgtttcagtatagggtttggtaaggcgctctggcggcgaactgataagctcggcaccgaatatgttatcgccctgatcccgttgggcggttatgtcaaaatgctggatgagcgcgcagaaccggtcgttccggaactccgccaccatgccttcaataataaatctgtcggccaacgagcggcgattattgccgcaggtccggttgcaaacttcatttttgctatctttgcctactggctggtttttattattggtgtgcctggcgtacgtccggtggttggcgaaatagcagccaatagcatagctgcggaagcacaaattgcaccaggtacggaactaaaagccgtagatggtatcgaaacgcctgattgggatgccgtgcgtttgcagttggtcgataaaattggcgatgaaagcaccaccattacagtagcgccatttggcagcgaccaacggcgggatgtaaagctcgatttacgtcactgggcgtttgagcctgataaagaagatccggtatctagcctggggattcgtcctcgtgggccgcaaattgaacctgtactggaaaatgtgcagccaaacagcgcggcaagcaaggcaggtttgcaagcaggcgacaggatcgttaaagtcgatggtcagcccttaacgcagtgggtgacctttgtgatgcttgtccgggataacccgggtaaatccttagcgttagaaatcgaaaggcaggggagtcccttgtctttgacattaatcccggagagtaaaccgggtaatggtaaagcgattggttttgtcggtattgagccgaaagtcattcctttgccagatgagtataaagttgtacgccagtatgggccgttcaacgccatcgtcgaagccacggacaaaacgtggcagctgatgaagctgacggtcagtatgctgggaaaattgatcaccggtgatgtgaaactgaacaacctcagtgggccgatctctatcgccaagggggctgggatgacagcggaactcggggttgtttattacctgccgtttcttgcgcttattagcgtgaacttagggataattaacctgtttccgttgcccgtacttgacggggggcatctgctgttccttgcgatcgaaaagatcaagggcggaccggtatccgagcgggttcaagacttttgttatcgcattggcagcattctgctggtgctgttaatggggcttgcacttttcaatgatttctctcggttatgagagttagttaggaagaacgcataataacgatggcgatgaaaaagttgctcatagcgagcctgctgtttagcagcgccaccgtatacggtgctgaagggttcgtagtgaaagatattcatttcgaaggccttcagcgtgtcgccgttggtgcggccctcctcagtatgccggtgcgcacaggcgacacggttaatgatgaagatatcagtaataccattcgcgctctgtttgctaccggcaactttgaggatgttcgcgtccttcgtgatggtgatacccttctggttcaggtaaaagaacgtccgaccattgccagcattactttctccggtaacaaaagcgtgaaagatgacatgctgaagcaaaacctcgaggcttctggtgtgcgtgtgggcgaatccctcgatcgcaccaccattgccgatatcgagaaaggtctggaagacttctactacagcgtcggtaaatatagcgccagcgtaaaagctgtcgtgaccccgctgccgcgcaaccgtgttgacctaaaactggtgttccaggaaggtgtgagtgctgaaatccagcaaattaacattgttggtaaccatgctttcaccaccgacgaactgatctctcatttccaactgcgtgacgaagtgccgtggtggaacgtggtaggcgatcgtaaataccagaaacagaaactggcgggcgaccttgaaaccctgcgcagctactatctggatcgcggttatgcccgtttcaacatcgactctacccaggtcagtctgacgccagataaaaaaggtatttacgtcacggtgaacatcaccgaaggcgatcagtacaagctttctggcgttgaagtgagcggcaaccttgccgggcactccgctgaaattgagcagctgactaagatcgagccgggtgagctgtataacggcaccaaagtgaccaagatggaagatgacatcaaaaagcttctcggtcgctatggttatgcctatccgcgcgtacagagcatgcccgaaattaacgatgccgacaaaaccgttaaattacgtgtgaacgttgatgcgggtaaccgtttctacgtgcgtaagatccgttttgaaggtaacgataccagcaaagatgccgtcctgcgtcgcgaaatgcgtcagatggaaggtgcatggctggggagcgatctggtcgatcagggtaaggagcgtctgaatcgtctgggcttctttgaaactgtcgataccgatacccaacgtgttccgggtagcccggaccaggttgatgtcgtctacaaggtaaaagagcgcaacaccggtagcttcaactttggtattggttacggtactgaaagtggcgtgagcttccaggctggtgtgcagcaggataactggttaggtacaggttatgctgttggtatcaacgggaccaaaaacgattaccagacctatgctgaactgagcgtaaccaacccgtacttcaccgtagatggcgtaagcctcggtggtcgtctcttctataatgacttccaggcagatgacgccgacctgtccgactataccaacaagagttatggtacagacgtgacgttgggcttcccgattaacgaatataacagcctgcgtgcaggtctgggttatgtacataactccctgtccaacatgcagcctcaggttgcgatgtggcgttatctgtactctatgggtgaacatccgagcacctctgatcaggataacagcttcaaaacggacgacttcacgttcaactatggttggacctataacaagcttgaccgtggttacttcccgacagatggtagtcgtgtcaacctgaccggtaaagtgaccattcctggaagcgataacgaatactacaaagtgacgttagacacggcgacttatgtgccgatcgatgacgatcacaaatgggttgttctggggcgtacccgctggggttatggtgatggtttaggcggcaaagagatgccgttctacgagaacttctatgccggtggttccagcaccgtgcgtggcttccagtccaataccattggtccgaaagcagtttacttcccgcatcaggccagtaattatgatccggactatgattacgaatgtgcgactcaggacggcgcgaaagacctgtgtaaaagcgatgatgctgtaggcggtaacgccatggcggttgccagcctcgagttcatcaccccgacgccgtttattagcgataagtatgctaacagcgttcgtacttccttcttctgggatatgggtaccgtttgggatacaaactgggattccagccaatattctggatatccggactatagtgatccaagcaatatccgtatgtctgcgggtatcgcattacaatggatgtccccattggggccgttggtgttctcctacgcccagccgttcaaaaagtacgatggagacaaggcagaacagttccagtttaacatcggtaaaacctggtaagtgttctccacaaaggaatgtagtggtagtgtagcgatgactttaggcgatcaatataagatcgccgggccacgcaaagaactgcaccctccggtgcaaatgggatggtaaggagtttattgtgaaaaagtggttattagctgcaggtctcggtttagcactggcaacttctgctcaggcggctgacaaaattgcaatcgtcaacatgggcagcctgttccagcaggtagcgcagaaaaccggtgtttctaacacgctggaaaatgagttcaaaggccgtgccagcgaactgcagcgtatggaaaccgatctgcaggctaaaatgaaaaagctgcagtccatgaaagcgggcagcgatcgcactaagctggaaaaagacgtgatggctcagcgccagacttttgctcagaaagcgcaggcttttgagcaggatcgcgcacgtcgttccaacgaagaacgcggcaaactggttactcgtatccagactgctgtgaaatccgttgccaacagccaggatatcgatctggttgttgatgcaaacgccgttgcttacaacagcagcgatgtaaaagacatcactgccgacgtactgaaacaggttaaataagtaatgcctagtattcgactggctgatttagcgcagcagttggatgcagaactacacggtgatggcgatatcgtcatcaccggcgttgcgtccatgcaatctgcacaaacaggtcacattacgttcatggttaacccaaaataccgtgagcatttaggcttgtgccaggcgtccgcggttgtcatgacccaggacgatcttcctttcgcgaaaagtgccgcactggtagtgaagaatccctacctgacttacgcgcgcatggcgcaaattttagataccacgccgcagcccgcgcagaacattgcacccagtgcggtgatcgacgcgacggcgaagctgggtaacaacgtaagcattggcgctaacgcggtgattgagtccggcgttgaactgggcgataacgtgattatcggtgccggttgcttcgtaggtaaaaacagcaaaatcggtgcaggtagccgtctctgggcgaacgtaaccatttaccatgagatccagatcggtcagaattgcctgatccagtccggaacagtggtaggcgcagacggctttggttatgccaacgatcgtggtaactgggtgaagatcccacagattggtcgcgtaattattggcgatcgcgtggagatcggtgcctgcacaaccatcgatcgcggcgcgctggatgacactattattggcaatggcgtgatcattgataaccagtgccagattgcacataacgtcgtgattggcgacaatacggcggttgccggtggcgtcattatggcgggcagcctgaaaattggtcgttactgcatgatcggcggagccagcgtaatcaacgggcatatggaaatatgcgacaaagtgacggttacgggcatgggtatggtgatgcgtcccatcactgaaccaggcgtctattccagtggcattccgctgcaacccaacaaagtctggcgcaaaaccgctgcactggtgatgaacattgatgacatgagcaagcgtctgaaaagccttgagcgcaaggttaatcaacaagactaacgttccatcttttgttcgccaaactttacggcctgtctcattcttacgattgcggcaggccgtgttattattgtcgtttcttatattttgacaggaagagtatcttgactactaacactcatactctgcagattgaagagattttagaacttctgccgcaccgtttcccgttcttactggtggatcgcgtgctggattttgaagaaggtcgttttctgcgcgcagtaaaaaatgtctctgtcaatgagccattcttccagggccatttccctggaaaaccgattttcccgggtgtgctgattctggaagcaatggcacaggcaacaggtattctggcgtttaaaagcgtaggaaaactggaaccgggtgagctgtactacttcgctggtattgacgaagcgcgcttcaagcgcccggtcgtgcctggcgatcaaatgatcatggaagtcactttcgaaaaaacgcgccgcggcctgacccgttttaaaggggttgctctggtcgatggtaaagtagtttgcgaagcaacgatgatgtgtgctcgtagccgggaggcctgatacgtgattgataaatccgcctttgtgcatccaaccgccattgtggaagagggcgcgagtattggcgcgaacgcacacattggtcctttttgtatcgttggaccccatgtcgaaattggtgagggtaccgtactgaaatctcacgttgtcgtgaatggtcatactaaaattggccgcgataatgagatttatcagttcgcctccatcggcgaagttaaccaggatctgaaatatgctggcgaaccgacccgtgtggaaatcggcgatcgtaaccgcattcgcgaaagcgtcaccattcatcgtggcacagtccagggcggtggattgacgaaggtgggcagcgacaacttactgatgatcaacgcgcacattgcgcacgattgtacggtaggtaaccgctgtattctcgccaacaacgcaacgctggcgggtcacgtaagcgttgacgacttcgcgatcatcggcggcatgaccgcagtccatcagttctgcatcattggtgcgcacgtgatggttggcggctgctccggtgtggcgcaggacgtccctccttatgtcattgcgcagggtaaccacgcaacgccgttcggtgtcaatatcgaagggctgaagcgccgcggattcagccgtgaggcgattaccgctatccgcaatgcgtataagctgatttatcgtagcggtaaaacgctcgatgaagtgaaaccggaaattgctgaactggcggaaacatatccggaagtgaaagcctttaccgatttctttgcacgcagtacgcgcggtctgattcgttaatgactgaacagcgtccattaacgattgccctggtcgccggagaaacctccggcgatatcctgggggccggtttaatccgcgctctgaaagaacatgtgcccaacgcccgctttgttggtgttgccgggccacgaatgcaggctgaaggctgcgaagcctggtacgaaatggaagaactggcggtgatgggcattgttgaagtgctcggtcgtctgcgtcgcttactgcatattcgtgccgatctgacaaagcgttttggcgaactgaagccagatgtttttgttggtattgatgcgcctgacttcaatattactcttgaaggtaacctcaaaaagcagggtatcaaaaccattcattacgtcagtccgagtgtctgggcgtggcgacagaaacgtgttttcaaaataggcagagccaccgatctggtgctcgcatttctgcctttcgaaaaagcgttttatgacaaatacaacgtaccgtgccgctttatcggtcataccatggctgatgccatgccattagatccagataaaaatgccgcccgtgatgtgctggggatccctcacgatgcccactgcctggcgttgctaccggggagccgtggtgcagaagttgaaatgcttagtgccgatttcctgaaaacggcccagcttttgcgccagacatatccggatctcgaaatcgtggtgccactggtgaatgccaaacgccgcgagcagtttgaacgcatcaaagctgaagtcgcgccagaccttagtgttcatttgctggatgggatgggccgtgaggcgatggtcgccagcgatgcggcgctactggcgagcggtacggcagccctggagtgtatgctggcgaaatgcccgatggtggtgggatatcgcatgaagccttttaccttctggttggcgaagcggctggtgaaaactgattatgtcagcctgccaaatctgctggcgggcagagagttagtcaaagaattattgcaggaagagtgtgagccgcaaaaactggctgcggcgctgttaccgctgttggcgaacgggaaaaccagccacgcgatgcacgataccttccgtgaactgcatcagcagatccgctgcaatgccgatgagcaggcggcacaagccgttctggagttagcacaatgatcgaatttgtttatccgcacacgcagctggttgcgggtgtggatgaagtcggacgcgggccgttagttggcgcggtcgtcaccgctgcggtgatccttgacccggcgcgcccgattgccgggctgaatgattccaaaaagctgagcgaaaaacgccgtctggcgctctatgaagagatcaaagagaaagcgttgagctggagtctgggccgcgcggaaccccacgaaatcgacgagctgaacattcttcatgcgaccatgctggcgatgcagcgtgccgtcgctgggctgcatattgcgccggaatatgtgttgattgatggtaaccgctgcccgaaattaccgatgcctgcgatggctgtggtgaaaggcgatagccgcgtaccggaaatcagtgccgcgtctatcctggcgaaagtgacgcgtgacgccgaaatggcggcgctggatattgttttcccgcaatatggttttgcccaacacaaagggtacccaaccgcttttcatctggaaaaactggctgaacacggcgcgaccgaacaccatcggcgcagctttgggcctgtcaaacgcgcactgggacttgcgtcctgattcttgtgtcgagattaagtaaaccggaatctgaagatgtctgaaccacgtttcgtacacctgcgggtgcacagcgactacagcatgatcgatggcctggccaaaaccgcaccgttggtaaaaaaggcggcggcgttgggtatgccagcactggcgatcaccgatttcaccaacctttgtggtctggtgaagttctacggagcgggacatggcgcagggattaagcctatcgtcggggcagattttaacgtccagtgcgacctgctgggtgatgagttaacccacctgacggtactggcggcgaacaataccggctatcagaatctgacgttgctgatcagtaaagcgtatcagcgcgggtacggtgccgccgggccgatcatcgatcgcgactggcttatcgaattaaacgaagggttgatccttctttccggcggacgcatgggcgacgtcggacgcagtcttttgcgtggtaacagcgcgctggtagatgagtgtgtcgcgttttatgaagaacacttcccggatcgctattttctcgagctgatccgcaccggcaggccggatgaagaaagctatctgcacgcggcggtggaactggcggaagcgcgcggtttgcccgtcgtggcgaccaacgacgtgcgctttatcgacagcagcgactttgacgcacacgaaatccgcgtcgcgatccacgacggctttaccctcgacgatcctaaacgcccgcgtaactatagcccgcagcaatatatgcgtagcgaagaggagatgtgtgagctgtttgccgacatccccgaagcccttgccaacaccgttgagatcgccaaacgctgtaacgtaaccgtgcgtcttggtgaatacttcctgccgcagttcccgaccggggacatgagcaccgaagattatctggtcaagcgtgcaaaagagggcctggaagagcgtctggcctttttattccctgatgaggaagaacgtcttaagcgccgcccggaatatgacgaacgtctggagactgaacttcaggttatcaaccagatgggcttcccgggctacttcctcatcgttatggaatttatccagtggagcaaagataacggcgtaccggtagggccaggccgtggctccggtgcgggtagtctggtggcctacgcgctgaaaatcaccgacctcgatccgctggaatttgacctgctgttcgaacgtttccttaacccggaacgtgtctccatgcctgacttcgacgttgacttctgtatggagaaacgcgatcaggttatcgagcacgtagcggacatgtacggtcgtgatgcggtaagccagatcatcaccttcggtacaatggcggcgaaagcggtgatccgcgacgtaggccgcgtgctggggcatccgtacggctttgtcgatcgtatcagcaaactgatcccgcccgatccggggatgacgctggcgaaagcgtttgaagccgagccgcagctgccggaaatctacgaagcggatgaagaagttaaggcgctgatcgacatggcgcgcaaactggaaggggtcacccgtaacgccggtaagcacgccggtggggtggttatcgcgccgaccaaaattaccgattttgcgccgctttactgcgatgaagagggcaaacatccggtcacccagtttgataaaagcgacgttgaatacgccggactggtgaagttcgacttccttggtttgcgtacgctcaccatcatcaactgggcgctggagatgatcaacaagcggcgggcgaagaatggcgagccgccgctggatatcgctgcgatcccgctggatgataagaaaagcttcgacatgctgcaacgcagcgaaaccacggcggtattccagcttgaaagccgcggcatgaaggacctgatcaagcgtctacaacctgactgcttcgaagatatgatcgccctagtggcactgttccgccccggtccgttgcaaagtgggatggtggataactttatcgaccgtaaacatggtcgtgaagagatctcctatccggacgtacagtggcagcatgaaagcctgaaaccggtactggagccaacctacggcattatcctgtatcaggaacaggtcatgcagattgcgcaggtgctttctggttataccctcggtggcgcggatatgctgcgtcgtgcgatgggtaagaaaaagccggaagagatggctaagcaacgttctgtatttgctgaaggtgcagaaaagaacggaatcaacgctgaactggcgatgaaaatcttcgacctggtggagaaattcgctggttacggatttaacaaaagccactctgcggcctatgctttggtgagttatcaaacgttatggctgaaagcgcactatcctgcggagtttatggcggcggtaatgaccgccgatatggacaacaccgagaaggtggtgggtctggtggatgagtgctggcggatggggctgaaaatcctgccaccagatataaactccggtctttaccatttccacgtcaacgacgacggcgaaatcgtgtatggtattggcgcgatcaaaggggtcggtgaaggtccgattgaggccatcatcgaagcccgtaataaaggcggctacttccgcgaactgtttgatctctgcgcccgtaccgacaccaaaaagttgaaccgtcgcgtgctggaaaaactgatcatgtccggggcgtttgaccgtcttgggccacatcgcgcagcgctgatgaacagcctgggcgatgcgttaaaagcggcagatcaacacgcgaaagcggaagctatcggtcaggccgatatgttcggcgtgctggccgaagagccggaacaaattgaacaatcctacgccagctgccaaccgtggccggagcaggtggtattagatggggaacgtgaaacgttaggcctgtacctgaccggacaccctatcaaccagtatttaaaagagattgagcgttatgtcggaggcgtaaggctgaaagacatgcacccgacagaacgtggtaaagtcatcacggctgcggggctcgttgttgccgcgcgggttatggtcaccaagcgcggcaatcgtatcggtatctgcacgctggatgaccgttccgggcggctggaagtgatgttgtttactgacgccctggataaataccagcaattgctggaaaaagaccgcatacttatcgtcagcggacaggtcagctttgatgacttcagcggtgggcttaaaatgaccgctcgcgaagtgatggatattgacgaagcccgggaaaaatatgctcgcgggcttgctatcagcctgacggacaggcaaattgatgaccagcttttaaaccgactccgtcagtctctggaaccccaccgctctgggacaattccagtacatctctactatcagagggcggatgcacgcgcgcggttgcgttttggcgcgacgtggcgtgtctctccgagcgatcgtttattaaacgatctccgtggcctcattggtagcgagcaggtggaactggagtttgactaatacaggaatactatgagtctgaatttccttgattttgaacagccgattgcagagctggaagcgaaaatcgattctctgactgcggttagccgtcaggatgagaaactggatattaacatcgatgaagaagtgcatcgtctgcgtgaaaaaagcgtagaactgacacgtaaaatcttcgccgatctcggtgcatggcagattgcgcaactggcacgccatccacagcgtccttataccctggattacgttcgcctggcatttgatgaatttgacgaactggctggcgaccgcgcgtatgcagacgataaagctatcgtcggtggtatcgcccgtctcgatggtcgtccggtgatgatcattggtcatcaaaaaggtcgtgaaaccaaagaaaaaattcgccgtaactttggtatgccagcgccagaaggttaccgcaaagcactgcgtctgatgcaaatggctgaacgctttaagatgcctatcatcacctttatcgacaccccgggggcttatcctggcgtgggcgcagaagagcgtggtcagtctgaagccattgcacgcaacctgcgtgaaatgtctcgcctcggcgtaccggtagtttgtacggttatcggtgaaggtggttctggcggtgcgctggcgattggcgtgggcgataaagtgaatatgctgcaatacagcacctattccgttatcagcccggaaggttgtgcgtccattctgtggaagagcgccgacaaagcgccgctggcggctgaagcgatgggtatcattgctccgcgtctgaaagaactgaaactgatcgactccatcatcccggaaccactgggtggtgctcaccgtaacccggaagcgatggcggcaagcttgaaagcgcaactgctggcggatctggccgatctcgacgtgttaagcactgaagatttaaaaaatcgtcgttatcagcgcctgatgagctacggttacgcgtaattcgcaaaagttctgaaaaagggtcacttcggtggcccttttttatcgccacggtttgagcaggctatgattaaggaaggattttccaggaggaacacatgaacatcattgccattatgggaccgcatggcgtcttttataaagatgagcccatcaaagaactggagagcgcgctggtggcgcaaggctttcagattatctggccacaaaacagcgttgatttgctgaaatttatcgagcataaccctcgaatttgcggcgtgatttttgactgggatgagtacagtctcgatttatgtagcgatatcaatcagcttaatgaatatctcccgctttatgccttcatcaacacccacagcacgatggatgtcagcgtgcaggatatgcggatggcgctctggttttttgaatatgcgctggggcaggcggaagatatcgccattcgtatgcgtcagtacaccgacgaatatcttgataacattacaccgccgttcacgaaagccttgtttacctacgtcaaagagcggaagtacaccttttgtacgccggggcatatgggcggcaccgcatatcaaaaaagcccggttggctgtctgttttatgattttttcggcgggaatactcttaaggctgatgtctctattagcgtcaccgagcttggtagcttgctcgaccacaccgggccacacctggaagcggaagagtacatcgcgcggacttttggcgcggaacagagttatatcgttaccaacggaacaagcacgagcaacaaaattgtgggtatgtacgccgcgccatccggcagtacgctgttgatcgaccgcaattgtcataaaagcctggcgcatctgttgatgatgaacgatgtagtgccagtctggctgaaaccgacgcgtaatgcgttggggattcttggtgggatcccgcgccgtgaatttactcgcgacagcatcgaagagaaagtcgctgctaccacgcaagcacaatggccggttcatgcggtgatcaccaactccacctatgatggcttgctctacaacaccgactggatcaaacagacgctggatgtcccgagcattcacttcgattctgcctgggtgccgtacacccattttcatccgatctaccagggtaaaagtggtatgagcggcgagcgtgttgcgggaaaagtgatcttcgaaacgcaaagcacccacaaaatgctggcggcgttaagccaggctagcctgatccacattaaaggcgagtatgacgaagaggcctttaacgaagcctttatgatgcataccaccaccagccccagttatcccattgttgctagcgttgagacggcggcggcgatgctgcgtggtaatccgggcaaacggctgattaaccgtagtgtagaacgagctctgcattttcgcaaagaggtccagcggctgcgggaagagtctgacggttggtttttcgatatctggcaaccgccgcaggtggatgaagccgaatgctggcccgttgcgcctggcgaacagtggcacggctttaacgatgcggatgccgatcatatgtttctcgatccggttaaagtcactattttgacaccggggatggacgagcagggcaatatgagcgaggaggggatcccggcggcgctggtagcaaaattcctcgacgaacgtgggatcgtagtagagaaaaccggcccttataacctgctgtttctctttagtattggcatcgataaaaccaaagcaatgggattattgcgtgggttgacggaattcaaacgctcttacgatctcaacctgcggatcaaaaatatgctacccgatctctatgcagaagatcccgatttctaccgcaatatgcgtattcaggatctggcacaagggatccataagctgattcgtaaacacgatcttcccggtttgatgttgcgggcattcgatactttgccggagatgatcatgacgccacatcaggcatggcaacgacaaattaaaggcgaagtagaaaccattgcgctggaacaactggtcggtagagtaagcgcaaatatgatcctgccttatccaccgggcgtaccgctgttgatgcctggagaaatgctgaccaaagagagccgcacagtactcgattttctactgatgctttgttccgtcgggcaacattaccccggttttgaaacggatattcacggcgcgaaacaggacgaagacggcgtttaccgcgtacgagtcctaaaaatggcgggataacttgccagagcggcttccgggcgagtaacgtgctgttaacaaataaaggagacgttatgctgggtttaaaacaggttcaccatattgcgattattgcgacggattatgcggtgagcaaagctttctactgcgatattcttggtttcacgctgcaaagcgaagtctatcgcgaagcgcgcgacagttggaaaggggatttggcgcttaatgggcaatatgtgattgagcttttcagttttccgttcccgccggaacgacccagccgaccggaagcttgcggtctgcgtcatctggcttttagcgttgatgacatcgatgcggcagtggcgcaccttgaaagccataacgtgaagtgtgaaaccatccgtgtcgatccatacacgcaaaaacgcttcaccttctttaacgatccggacgggctgccgttggaactgtatgagcagtaaggcttgtcatcgccgcatttgcccggtaacgtgccgggcattgctactgtaaaatcgcaccatcatgacactcacgctcaatagacaacttctcaccagtcgccagattctggtggcctttagcggcgggcttgactccaccgttctgctgcatcagttggtgcagtggcggacggaaaatccgggtgtcgctctgcgcgctattcatgtgcatcacggtttaagtgccaatgccgatgcctgggttacgcattgcgaaaacgtctgccaacagtggcaggtgccgctggtggtcgaacgcgtacaacttgcgcaagaaggactgggcattgaggcccaggcgcggcaggcacgttatcaggcatttgcccgcaccttgttgcccggtgaagtgctggtcaccgcgcaacatctcgacgatcaatgtgaaacctttctgctggcgctaaaacgcggcagtggccctgccgggcttagcgctatggcggaagtcagcgagtttgccggaacgcggcttattcgcccgttgctcgcccgcacgcggggggaactggtgcagtgggcgcgtcagtatgatttacgctggattgaagacgaaagtaatcaggacgacagttacgatcgtaactttctgcgcctgcgcgtagtgccgttattgcagcagcgttggccgcattttgccgaagcaacggcccgcagcgccgcactttgtgctgaacaagagagcctgctggatgaactgctggcagatgatttagcacactgtcaaagcccgcaggggacgctgcagattgtgccaatgctggcgatgagtgatgcccgccgcgcggcgattatccgccgctggctggcagggcagaatgcaccgatgccttcccgcgacgcgttggtgaggatctggcaggaagtggcgctggcgcgggaagatgccagtccctgtttacgtttgggcgcgtttgaaatccgacgctatcagagccaactgtggtggattaaatccgtcaccgggcaaagcgaaaacattgtgccgtggcagacgtggcttcaaccgctggaattaccggcggggctgggaagtgtacagcttaatgcgggaggcgatattcgccctccgcgtgcagacgaagcggtcagcgtgcgtttcaaagcgccaggattgctgcatattgtcgggcgtaacggcggacgtaagctaaagaaaatctggcaagagctgggcgtgccgccgtggctacgtgacaccacgccactgctgttttatggcgaaacgctgattgcggcggcaggggtatttgtgacgcaagaaggtgtggctgaaggtgagaatggcgtaagttttgtctggcagaaaacgcttagttaagtgaaagccggataagacgcatcaaacgtcgcatccggcgaaagtcaatcaggattcgcttaccaccaccgtaccgatttccgggtggctaaagctggtaattttatccagacgcagctcgcgggtttcgccagcggcctcgacgaccaggtactccacatttttgcgggagactaaatcactggcttttgcctgcaatttttcgccatctttcagctcaagtgtcagcattaaatgatgctggcaggcgagctcaagattatcgtaatcatcacaattgattggttgatacgtatcattcattgacataatcgctcaccagtaagtttgccgcagcgtatgctgctttttccctgacagcctcagaaagggcgtcgtcggcagccatttcattcagcactttcaaaacgcagcccagcgcgtccggaacgtatcctaagtctccgctggcgatttccgcgtaccgcttgcgtattaactcacaatatttttccacatgccctcctgtcagcactctgacttaaccgtggatgcaagtctaagcctacgaagataaactctgtttcgcaaggtgactataccacactcatttctgcaatatcagcgccgcaactgcacgtattccgttacaatggcctcctgattcgaaaggagttttcttatggcgcttaaagcgacaatttataaagcgacggttaatgtggccgatctcgaccgcaaccagtttctcgatgcctctctgacgctggcgcgccatcctagtgaaacccaggagcgtatgatgctgcgcttgctggcgtggctgaaatatgctgatgaacgtctgcaatttacccgtggtttgtgtgccgatgatgagccggaagcgtggctgcgtaacgatcacctgggcattgatttgtggattgagctggggctgccggatgagcggcggattaagaaagcctgcacccaggccgcagaagtggcgctgtttacctataatagtcgggcggcgcaaatctggtggcagcaaaatcagagcaaatgtgtgcagtttgccaatctttccgtctggtatctggacgatgaacaactggcgaaagtaagcgcctttgccgatcgtaccatgacgctgcaggcaacgattcaggatggcgtgatctggttaagcgatgataagaataatctggaagtgaacttaaccgcctggcaacaacctagttgaactaaaccgcctggcaacaaccttcatgattgtgatttcccgacatgttgctattcccgatggtgagcttgagatcaccgccattcgtgcgcagggcgcgggcgggcagcatgttaataagaccagtacggctattcatctgcgttttgacattcgggcgtccagcctgccagagtattacaaagagcgtctgctcgccgccagccatcatttgatcagcagtgatggcgtgattgtcattaaggcacaggaataccgcagtcaggaactgaaccgcgaagcagctctggcccggctggtggctatgattaaagaattaacaacagaaaaaaaagcccgacgacccacgcggcccacccgtgcaagcaaagagcgcaggctggcaagcaaagcacaaaaaagtagcgtgaaggcgatgcgcggcaaagtgcgcagcggtcgggaataaaaagaaggaatggatggtgaaaaaagcgatagtgacagcgatggctgtaatcagcctctttactctgatgggatgtaataatcgggccgaagtcgatacgctttctccggcgcaggctgccgaactgaaaccgatgccgcaaagttggcgcggcgtgctgccgtgtgccgattgcgaaggaatcgaaacctctctgttcctcgaaaaagacggaacatgggtgatgaatgagcgttatctcggtgctcgtgaagaaccttcctccttcgcttcctacggtacatgggcgcgaaccgctgacaagctggtattaaccgacagcaaaggtgaaaagagttattatcgggcgaaaggcgatgcgctggagatgctcgatcgtgaaggcaatccgattgaaagccagttcaactatacgctggaagcggcacaatccagtttacctatgacgccgatgaccctgcggggcatgtatttttatatggctgatgcggcgaccttcactgattgcgcgaccggaaaacgtttcatggtagcgaataacgcagagctggagcgtagctacctggctgcgcgcggtcacagtgaaaaaccggtgttactgagtgtagaaggtcactttacgcttgagggtaatccggataccggtgcgccgactaaagtattggcacccgatacggcagggaaattttaccccaaccaggattgcagtagtttggggcagtaacccgtcttgagacagaaacaaacgcaaaacaggccagaaggatatatttcaacattttgaatttgcacgttttttgtaggccggataaggcgtttacgccgcatccggcaatggtgctcaacgcctgatgcgacgctggcgcgtcttatcatgcctacaacccccctcataccttaaggcggataaggcatttactttatcaccgggtcaaaccaacaaagcgacccgccttgatataaatcccaggcttcaggtgcccaacatactgtaactgcgtttctggcttaaacgcagagacatcaccaatacgcatatgcatcagatcggcagggctaatccagccgctttgcgccagtgtaagtggatgcccggctttggcaaaggcatccgtgacaaattcgctacaaaaccagctctttttgtctccttcgcccacactgcttaactgcgctttcgccaggccgctgacgcactgttggcgaaaatcctcggagaacggattcagactgcacatctggcgagtcaccataaagggaataaattcgacaatgccgcgatagttataaccgctatctttgattttattggcaaacgcggtgatatctgtggcttgttgcggggtaagatccgggactcgtaagacgaaaagcttatcactatgcttcatcgcttttttaagggaaacgatctggacgccagcgcctgtcgcttctgcaacgttattatcacccagaaagattgcaacgtgactcacagaggaagtgctgaagacgcggattccaaaactggttaccccaaggctactggagaacagcaaatcgccgggtttgagatcaggtgccgttatttcttttatactttgttcggtgaaagagctttgatgctggaatttgacagcccatgtttttgcctcggcatctactgctgtggcacttgggtctggctggctgatatcaacggtacaagcgctaagtaaaagaaagctggggagaaacaggcggcagtacgcctttggtttatccattttatacaatccatgtaaaaaaagggccctgaaattcaggaccctttctggcatcagcctttaatctgtttcaccagatattcgacgatgtcaccagtcttaattaactgtttctcgccgttgcgacgatatttatattcgatatcgtcgttgtcgaggttacggtcgcccagcacaatagtgtgcggaataccgatcagttccatatcagcaaacatcacgcccggacgctctttgcggtcatccagcagcacttcgataccttgtgcacgcagttcgctgtacagtttctcagcaagctcttgtacgcggaaggatttgtgcatgttcatcggcagaatcgccacctggaacggcgcgatagcgtcaggccatacgatgcctcgttcgtcgtagttctgctcaatcgccgcagctaccacacgcgttaccccgataccgtagcaacccatcgtcaggatttggttacggccatcttcaccctgtacggaggctttcagtgcttcggagtacttggtacccagctggaagatgtgaccaacttcgataccacgtttgatcagcagcctaccctggccatccgggcttggatcgccagccaccacgttacggatatctgcaacttccggggtagcgacatcgcgatcccagttgatgccgaagtagtgtttaccatcgatgttagcaccagcagcgaaatcactcatcgccgcaacggtacggtcaatcaccaccggaatcggcatgtttaccggacccagactacccggaccggctttaaccacggcacgaatttcttcttcggtcgcgaaagtcagcgggcttgcaacctgcggcagtttttctgctttaacttcgttcagctcgtgatcaccgcgcaccagcagcgcaacctgcgggaagctgctgccttcaaccgctttaaccagcagagtcttaaccgttttctcaatcggcagattgaactgttcaaccagttccgcgatggttttcgcgttcggcgtatcaaccagcgtcatttcctgggtagcagcagcgcgcggttctttcggcgcgatagcttctgccagttcaatgttcgctgcatagtcagaggtgtcggagaagaccacatcgtcttcaccgctctgcgccagcacctggaattcgtgagaggcgctgccgccgatagaaccggtgtcggcttgtacggcgcggaaatccagccccatgcggctgaagattttgctgtaggccgcatacattgcatcgtaggtttcctgcagggattcctgagaagtatggaaagagtaagcatctttcatcaggaattcgcgggaacgcatgacgccgaaacgcggacgcacttcgtcgcggaacttggtctggatctgatagaagttcagcggcagctgtttgtaagagctaagctcgttacgaatcaggtcagtgataacttcttcatgagttgggccgagtacgaacggacgctcgccacggtcaacaaaacgcagcagttccggaccgtactgttcccaacgaccactctcttgccacaaatcggctggctgaaccaccggcatgctcacctcgatcgcaccggcgttgttcatctcttcacgcacgatgttttcgacttttttcagaacgcgcacgccggtcggcagccaggtatataacccggaggccagcttgcggatcatcccggcgcgcagcatcagctgatggctgatcacctcggcgtcggcaggtgtctccttgagagtggagagcaggtattggctagtacgcatgttgttacggttccagttggaaggtagaacaggctcaaggcgagcctgggacaaaaaaaagtgatttagtttaccagtgcaaaagaaatgtcaaaagagaagggcgtgaatttaacgcggttccagcgcaaagacttcaaaacctgcgtcggtgacgcgccagcgaacgttaaaatcatgtagccagacggcataggttttgcccgtttcctcacctttacgataggccgggcgcgggtcctgcgccagtacttcgcggataaacagcgttaactgcggataacgcttctccagcgtcaaaagctgcttttcgacctctgcggtaaaactcaccgccatctctgcagctggcgcactttgcgcatagctggcactggcatcgggaaggctttcggcaaaggggagatacggtttgatatccactaccggcgtaccatcgaccagatccagactgccgagcttcagaatcacgctgtctttatggcaaacaacctctttcagctctaccaggctcatgccaattgggttagggcggaaagtagagcgtgttgcgaaaacccccattctggcgttaccgccgaggcgcggtggacgcacagtcggacgccagccgccttccatcgtttgatgaaagacgaaaaggatccataaatggctgaacgcttccaggccgcgaacggcgtcggcctggttgtagggagcaatgagatgcagttcgccgttggcgctttttaccagacctggctggcgcggaacggcgaacttttctttataggggctgcgaataacgcctatttgctcgaactggaaactgctcatttcgccgtaatgttaagcgcagaaccgatacatacagcctgacgatagcagcctggcgtaccgctggtgacttcgcagctatgcagtaatacagcattggctttcattttagaggcgttgatttgcatccgcttacgtgcggttggaatgctcggcggagagtcctgattagaggcctggcaagagtcgccactgacttcaccgagatcgcggaacggtttgccgactaattcttctgcattggtataaattcggaccggcgtggcgcgcggcgctttcggttttgcaggctccgctttcggctggggtgcagtgctttgaacgggttcgacaggggatctgcttaacatggaacagccgcttagcatgagtgctactaaacagatcggtaaagcacgcatagtatttcctcaatgtatgatcaaaacgtcaatattgaatcaggagcttgtaaaaatgacaagacgggcaagcgcccgtcctgaatgatattacaaattgtggaaacagcctaaaaattaccagcctttaacagctccgccgttaaacactttgtttgctgcttcgtaaacttcgtcagactgataagcctggacgaatttcttcacgttctcggcgtctttgttatcttcacgcgtcacgatcaggtttacgtacggggactctttatcttcaacaaagataccgtctttcgccggagtcaggccaatctggctggcataggtggtattgataactgccagagcgatttgcgcgtcgtccagagaacgcggcagttgcggtgcttccagttcaacaattttcagatttttggggttctcaacaacatcaagaacggtcggcagcaggccaacgccatctttcagtttgatcaagcccactttttgcagcagcagcagactacgaccaaggttagttgggtcgtttggcacggcaacctggctaccatcctgcagttcatccagacttttgattttcttggagtaaccagcaatcggataaacaaaagtgttgcctactgcgaccagtttgtagccacgatctttcagttgctgatcaaggtacggtttatgctggaaggcgttggcgtcgatatcgcctttgctcaatgcttcgtttggcagaacatagtcgttgaaggttaccagctcaacgtccaggccatatttgtctttcgcaactttctgcgcgacttctgcaacctgctgttcggcaccaacaatcacgccgactttaatgtggtttggatctttttcatcctgaccgcagcctaccagtgccagacttccgatcagggctcccactgccgcaaaggttttgaatttgaacgccataccttattccttcttcaattatttatgttgtgttgaacgttacttgcgagtgacagcccggacgatgcggtcgcctgcgaactgaattaaataaaccagaatgaccagcaataccagtaccgtattcatcaccgtcgcgttatagccgatgtagccatactgatagccaatctgacctaaaccaccggcaccgactgcaccacccatcgcggaataaccgaccagggtaatcagggtgatagttgccgcattcaccagacccggcagcgcttccggtaacagcaccttacggacgatctgcatcggcgtggcacccattgcgcgggaagcttcaattaacccggttgggatctccagcagagcgttctcgaccatacgggcaataaacggtgctgcaccaacggttaacggaacaatcgctgcctgcaaaccaatgcttgtaccgacaataacgcgggtaaacggaatcatccatacaagcaagataatgaacgggatggaacggaaaatgttcacaatcgcagaaacggtacgatacagcttcgcgttagcaataatttgccccggacgcgtgacataaagcagaacgccaaccggcagaccaatcacaaagccaaaaaaaccggatacgaaggtcattgccagcgtttcccatacgccacgaaccagcagccacatcatcggctcagacataacccagtacctctacttttacatggtgttcctgcagccaggcaatggcggcttgcgtatcttgttgtgtgccgtgcatttcagtcagcatgatgccgaacttaacgccaccggcgtaatccatctgcgcgctaataatgttgttgttgacgttgaaacgacgcgcggtttcagaaagcagtggggcatcgacgctttgaccggtaaactccagacgcagcatcggcacgcagtcagtaaatggctccgcttgcagacgttcctggtaatcttccgggatatccagatgcagggtgctctgaataaacttctgcgccagcggcgttttcggatggctgaacacttcacttaccgtgtcctgctcgatcagttctccattgctgatgaccgccacgcaatcacaaatgcgcttcacaacgtccatttcgtgggtgatcaacagaatcgtcaaccccagacggcggttgatgtctttcagcagttcgagaatagaacgtgtcgttgccgggtccagcgcgctggtggcttcatcacacagcaatactttgggattgctggctaacgcacgggcaattgccacacgttgtttctgcccaccggaaagattgctcgggtagctatcatgcttatcgccaagaccaaccaaactcagcaattccgtcacgcgacgtttgacctcgtctttcggtgtgttgtccagctccagcggcagagccacgttgccaaaaacagtacggctagagagcaggttaaaatgctggaaaatcataccaatctggcggcgagctttggtcaactcggattcactcagcgtggtcagttcctggccatcgaccagcacgctaccctcggttgggcgctccagcaggtttacacaacgtataagcgtactcttacccgcgccactggcaccgataacgccataaatttgtccagctggcacatgcaggctgacgttgttcaacgcctggatggtgcgggtgccctggtggaacactttggtgatattgctaagttttatcattgattatttattatcgtcattaagttagtcgtggcatctcgaatgcctgaaacgggcaacgccgtcaatgaaatggatgttaaggcatccagacgtctaaatcaatcaggtttatgcgaagagcactttcttgcaggtcgaaacatgcgatactagcgtcacatgccttattaaggagctataaaaggtggcgaagagcgtacccgcaatttttcttgaccgtgatggcaccattaatgtcgatcacggctatgtccatgagatcgacaactttgaatttatcgacggtgttattgacgccatgcgcgagctaaaaaaaatgggctttgcgctggtggtagtaaccaaccagtctggcattgctcgcggtaaatttaccgaagcacagtttgaaacgctgaccgagtggatggactggagcctggcggaccgagatgtcgatctggatggtatctattattgcccgcatcatccgcagggtagtgttgaagagtttcgccaggtctgcgattgccgcaaaccacatccggggatgcttttgagtgcacgcgattatttgcatattgatatggccgcttcttatatggtgggcgataaattagaagatatgcaggcagcggttgcggcgaacgtgggaacaaaagtgctggtgcgtacgggtaaacctattacgcctgaagcagaaaacgcggcggattgggtgttaaatagcctggcagacctgccgcaagcgataaaaaagcagcaaaaaccggcacaatgattaaaagatgagcggttgaaataaaaatgcatttttccgcttgtcttcctgagccgactccctataatgcgcctccatcgacacggcggatgtgaatcacttcacacaaacagccggttcggttgaagagaaaaatcctgaaattcagggttgactctgaaagaggaaagcgtaatatacgccacctcgcgacagtgagctgaaagccgcgtcgcaactgctctttaacaatttatcagacaatctgtgtgggcactcgaagatacggattcttaacgtcgcaagacgaaaaatgaataccaagtctcaagagtgaacacgtaattcattacaaagtttaattctttgagcatcaaacttttaaattgaagagtttgatcatggctcagattgaacgctggcggcaggcctaacacatgcaagtcgaacggtaacaggaagaagcttgcttctttgctgacgagtggcggacgggtgagtaatgtctgggaaactgcctgatggagggggataactactggaaacggtagctaataccgcataacgtcgcaagaccaaagagggggaccttcgggcctcttgccatcggatgtgcccagatgggattagctagtaggtggggtaacggctcacctaggcgacgatccctagctggtctgagaggatgaccagccacactggaactgagacacggtccagactcctacgggaggcagcagtggggaatattgcacaatgggcgcaagcctgatgcagccatgccgcgtgtatgaagaaggccttcgggttgtaaagtactttcagcggggaggaagggagtaaagttaatacctttgctcattgacgttacccgcagaagaagcaccggctaactccgtgccagcagccgcggtaatacggagggtgcaagcgttaatcggaattactgggcgtaaagcgcacgcaggcggtttgttaagtcagatgtgaaatccccgggctcaacctgggaactgcatctgatactggcaagcttgagtctcgtagaggggggtagaattccaggtgtagcggtgaaatgcgtagagatctggaggaataccggtggcgaaggcggccccctggacgaagactgacgctcaggtgcgaaagcgtggggagcaaacaggattagataccctggtagtccacgccgtaaacgatgtcgacttggaggttgtgcccttgaggcgtggcttccggagctaacgcgttaagtcgaccgcctggggagtacggccgcaaggttaaaactcaaatgaattgacgggggcccgcacaagcggtggagcatgtggtttaattcgatgcaacgcgaagaaccttacctggtcttgacatccacagaactttccagagatggattggtgccttcgggaactgtgagacaggtgctgcatggctgtcgtcagctcgtgttgtgaaatgttgggttaagtcccgcaacgagcgcaacccttatcttttgttgccagcggtccggccgggaactcaaaggagactgccagtgataaactggaggaaggtggggatgacgtcaagtcatcatggcccttacgaccagggctacacacgtgctacaatggcgcatacaaagagaagcgacctcgcgagagcaagcggacctcataaagtgcgtcgtagtccggattggagtctgcaactcgactccatgaagtcggaatcgctagtaatcgtggatcagaatgccacggtgaatacgttcccgggccttgtacacaccgcccgtcacaccatgggagtgggttgcaaaagaagtaggtagcttaaccttcgggagggcgcttaccactttgtgattcatgactggggtgaagtcgtaacaaggtaaccgtaggggaacctgcggttggatcacctccttaccttaaagaagcgtactttgcagtgctcacacagattgtctgatgaaaatgagcagtaaaacctctacaggcttgtagctcaggtggttagagcgcacccctgataagggtgaggtcggtggttcaagtccactcaggcctaccaaatttgcacggcaaatttgaagaggttttaactacatgttatggggctatagctcagctgggagagcgcctgctttgcacgcaggaggtctgcggttcgatcccgcatagctccaccatctctgtagtggttaaataaaaaatacttcagagtgtacctgcaaaggttcactgcgaagttttgctctttaaaaatctggatcaagctgaaaattgaaacactgaacaatgaaagttgttcgtgagtctctcaaattttcgcaacacgatgatggatcgcaagaaacatcttcgggttgtgaggttaagcgactaagcgtacacggtggatgccctggcagtcagaggcgatgaaggacgtgctaatctgcgataagcgtcggtaaggtgatatgaaccgttataaccggcgatttccgaatggggaaacccagtgtgtttcgacacactatcattaactgaatccataggttaatgaggcgaaccgggggaactgaaacatctaagtaccccgaggaaaagaaatcaaccgagattcccccagtagcggcgagcgaacggggaggagcccagagcctgaatcagtgtgtgtgttagtggaagcgtctggaaaggcgcgcgatacagggtgacagccccgtacacaaaaatgcacatgctgtgagctcgatgagtagggcgggacacgtggtatcctgtctgaatatgggggggaccatcctccaaggctaaatactcctgactgaccgatagtgaaccagtaccgtgagggaaaggcgaaaagaaccccggcgaggggagtgaaaaagaacctgaaaccgtgtacgtacaagcagtgggagcatgcttaggcgtgtgactgcgtaccttttgtataatgggtcagcgacttatattctgtagcaaggttaaccgaataggggagccgaagggaaaccgagtcttaactgggcgttaagttgcagggtatagacccgaaacccggtgatctagccatgggcaggttgaaggttgggtaacactaactggaggaccgaaccgactaatgttgaaaaattagcggatgacttgtggctgggggtgaaaggccaatcaaaccgggagatagctggttctccccgaaagctatttaggtagcgcctcgtgaactcatctccgggggtagagcactgtttcggcaagggggtcatcccgacttaccaacccgatgcaaactgcgaataccggagaatgttatcacgggagacacacggcgggtgctaacgtccgtcgtgaagagggaaacaacccagaccgccagctaaggtcccaaagtcatggttaagtgggaaacgatgtgggaaggcccagacagccaggatgttggcttagaagcagccatcatttaaagaaagcgtaatagctcactggtcgagtcggcctgcgcggaagatgtaacggggctaaaccatgcaccgaagctgcggcagcgacgcttatgcgttgttgggtaggggagcgttctgtaagcctgtgaaggtgtactgtgaggtatgctggaggtatcagaagtgcgaatgctgacataagtaacgataaagcgggtgaaaagcccgctcgccggaagaccaagggttcctgtccaacgttaatcggggcagggtgagtcgacccctaaggcgaggccgaaaggcgtagtcgatgggaaacaggttaatattcctgtacttggtgttactgcgaaggggggacggagaaggctatgttggccgggcgacggttgtcccggtttaagcgtgtaggctggttttccaggcaaatccggaaaatcaaggctgaggcgtgatgacgaggcactacggtgctgaagcaacaaatgccctgcttccaggaaaagcctctaagcatcaggtaacatcaaatcgtaccccaaaccgacacaggtggtcaggtagagaataccaaggcgcttgagagaactcgggtgaaggaactaggcaaaatggtgccgtaacttcgggagaaggcacgctgatatgtaggtgaagcgacttgctcgtggagctgaaatcagtcgaagataccagctggctgcaactgtttattaaaaacacagcactgtgcaaacacgaaagtggacgtatacggtgtgacgcctgcccggtgccggaaggttaattgatggggttagcgcaagcgaagctcttgatcgaagccccggtaaacggcggccgtaactataacggtcctaaggtagcgaaattccttgtcgggtaagttccgacctgcacgaatggcgtaatgatggccaggctgtctccacccgagactcagtgaaattgaactcgctgtgaagatgcagtgtacccgcggcaagacggaaagaccccgtgaacctttactatagcttgacactgaacattgagccttgatgtgtaggataggtgggaggctttgaagtgtggacgccagtctgcatggagccgaccttgaaataccaccctttaatgtttgatgttctaacgttgacccgtaatccgggttgcggacagtgtctggtgggtagtttgactggggcggtctcctcctaaagagtaacggaggagcacgaaggttggctaatcctggtcggacatcaggaggttagtgcaatggcataagccagcttgactgcgagcgtgacggcgcgagcaggtgcgaaagcaggtcatagtgatccggtggttctgaatggaagggccatcgctcaacggataaaaggtactccggggataacaggctgataccgcccaagagttcatatcgacggcggtgtttggcacctcgatgtcggctcatcacatcctggggctgaagtaggtcccaagggtatggctgttcgccatttaaagtggtacgcgagctgggtttagaacgtcgtgagacagttcggtccctatctgccgtgggcgctggagaactgaggggggctgctcctagtacgagaggaccggagtggacgcatcactggtgttcgggttgtcatgccaatggcactgcccggtagctaaatgcggaagagataagtgctgaaagcatctaagcacgaaacttgccccgagatgagttctccctgactccttgagagtcctgaaggaacgttgaagacgacgacgttgataggccgggtgtgtaagcgcagcgatgcgttgagctaaccggtactaatgaaccgtgaggcttaaccttacaacgccgaagctgttttggcggattgagagaagattttcagcctgatacagattaaatcagaacgcagaagcggtctgataaaacagaatttgcctggcggccgtagcgcggtggtcccacctgaccccatgccgaactcagaagtgaaacgccgtagcgccgatggtagtgtggggtctccccatgcgagagtagggaactgccaggcatcaaattaagcagtaagccggtcataaaaccggtggttgtaaaagaattcggtggagcggtagttcagtcggttagaatacctgcctgtcacgcagggggtcgcgggttcgagtcccgtccgttccgccacttattaagaagcctcgagttaacgctcgaggttttttttcgtctgtatatctattattgccagaatcgcaaaaatcctctgcattttacgctctttttcctcaacagtctgaagcccataatcacctcagttaacgaaaatagcattaaaagaggcatattatggctatccctgcatttggtttaggtactttccgtctgaaagacgacgttgttattagttctgtgataacggcgcttgaacttggttatcgcgcaattgataccgcacaaatctatgataacgaagccgcagtaggtcaggcgattgcagaaagtggcgtgccacgtcatgaactctacatcaccactaaaatctggattgaaaatctcagcaaagacaaattgatcccaagtctgaaagagagcctgcaaaaattgcgtaccgattatgttgatctgacgctaatccactggccgagtccaaacgatgaagtctctgttgaagagtttatgcaggcgctgctggaagccaaaaaacaagggctgacgcgtgagatcggtatttccaacttcacgatcccgttgatggaaaaagcgattgctgctgttggtgctgaaaacatcgctactaaccagattgaactctctccttatctgcaaaaccgtaaagtggttgcctgggctaaacagcacggcatccatattacttcctatatgacgctggcgtatggtaaggccctgaaagatgaggttattgctcgtatcgcagctaaacacaatgcgactccggcacaagtgattctggcgtgggctatgggggaaggttacagtgtaattccttcttctactaaacgtaaaaacctggaaagtaatcttaaggcacaaaatttacagcttgatgccgaagataaaaaagcgatcgccgcactggattgcaacgaccgcctggttagcccggaaggtctggctcctgaatgggattaagcctctctgacagctcctccgggagctgtttttacatgctcgctaaggaaatcgataaaagcccggatgcgcgtacttaccgcacggtcgctgtaatagacggcactgaatggcatttccactggcaacactttatctgccattaactccaccaattctccgcgagcgatttctttgtcgatcatgtagtcggacaaacacgcaatcccgttgccactcaggcaaagctgtttcagtgtttccccactattggaactcaaaccgtacttcacctcatgtaattgtccatcgctacgggctatcggccaggtattgagggaagcgggttcagtgaatcccaggcaaatatgttgctttaaatcgtcgatcgtttctggcttcccgtagcgggaaatataatcgggggaggcgataatttttcgataactgttaaataacggcctggcacgtaagctggaatccgttaacgtaccagcgcgtatcgcgacatccacttttctttcgatcaaattaataatcgtttcggaggagactaggctcaaagtgacttccggatagcgttcacggaaaggcttaattaacggcatcagaaagtgcagcaccactggagttgcggcatcgatccgtaacagtccacgcggtgtattacgcgtctccataatttcactttctgccgctgccatctcctgcaaaatactctgtacgcgacgaaaataacgctcgccttcttccgtcaggctaagttgtcgcgtggtccgattaagcaggctaacgccaagtttcatctccagctttttcaccgcccggcttaccgcactgtttgcttgccctaattgttccgctgcccggctaaagctgccgctttcgacgacgctaacaaaaatggcgagttcttcgctcgtggctttcatttttgctcctgttgcaaaatagaagagatattttgaatttatttgtcattaaaccatcaggatgcgtgatatgtcatgcgatttaatgttctccataatgagcaaaattctgaccggtgtaagcacttgcttacataacaatatacaattgctcgttgaaagagtgagctaaaatccctataacagtagaaccctcccgagtgcggaagggttgacgtaatagaggtttcaaagtcaaaagtgcgaaaaaacacctatgccatgcgctatgttgccggacaacctgcggaaaggatcttaccgccggggtcttttgcgagcatcggccaggcattaccacctggggaaccgttaagtaccgaagagcgtattcggatcctggtgtggaacatatacaaacagcaacgcgctgaatggttgagcgtattaaagaactacggcaaagatgcacatctggtgttattgcaggaagcgcagacaacgccagagttagtacagtttgcgaccgctaactatcttgccgccgatcaggtacccgctttcgtgctgccacaacatccttctggcgtaatgacccttagcgcggcacatccagtgtattgctgcccgttacgtgaacgagaacccattttgcgtctggcgaagagcgcactggtgacggtctatccattacctgacacccgcctgttgatggtggttaatatacacgccgtcaacttcagtctgggcgtggatgtctatagtaagcagttacttcctattggcgatcagatagctcaccacagcggcccggtcattatggcgggagatttcaatgcctggagccgtagaaggatgaacgcgttatatcgctttgcgcgggaaatgagcctgcgccaggtgcgttttaccgatgatcagcgccgtcgggcgtttggtcgcccgctcgattttgttttctaccgtggtctgaacgtcagtgaagcttctgtactggttacgcgcgcttccgatcacaatccgctactcgttgaattcagtcccggcaagcctgataaataaggtatgagtggtctgccacagggcagaccaacgtttggcgctgcgcaaaacgtgagcgcggtggtggcgtatgacttatctgcccacatgctggatgtcgtggcacaagctgccgaagcccggcaactgaaaaatatcaccacccgccagggatatgccgaaagtctgccatttgccgataacgcatttgatattgttatcagccgttattctgcccatcactggcatgatgttggtgcagcactgcgagaagtgaataggatattgaaacctggcggtaggctgattgtgatggacgtaatgtctccgggtcacccagtgcgcgacatctggttacagacggtagaagcattacgcgatacctctcacgtacgaaactacgccagcggtgagtggttgacgttaatcaatgaagccaatctgatagttgataatttaattacagataagttaccgctggaattttctagttgggtcgcgagaatgcgtacgccagaagcgttagtagacgctattcgcatttaccaacagagcgcaagcacagaggtgagaacgtattttgccttgcagaatgatggctttttcaccagtgatatcatcatggtagatgcacataaagcggcataaataaaaaaggcaccgggggaatcggtgcctttttattatctggtttgtcaggaatctggcatgttgttgtttttcacaaacaacgtcagcttatcgcctggttgcagattcgcagtgtcgctgttccagcgcatcacatctttgatgttcacgccgtggcgtttagcaatgctactaaggctatcgcctttgcgcacacgatacgtaatgctatcgctgttgtttgccagtcgctgtgcgctactgcctgcaccaatcgtcaaactttggcctggcttcagcttagatccgcgcagtttgttccactgctgcaaatctttggtgcttacgccgagacgactagcgatactactaagcgtgtcgccagagcgtacggtgtaaacacggctgttaagcggcgtattgtcggcaaccagcgtgctctgtacagcagcaatttcgccactagccagagattcacgcagttgatctgcatgcttctttggcaccatcacgtactgcgggccacttgcgcccagcgtggagccttttacgccagcgttgaatgtcttcagcttgctgacggaaatccccgccatatctgctaccttcgccatttcaaccgggctgctcaggtgcacacgcgccagagcacggctttcatcggtcgttggcagacgtacgccataacgcttgctgtttttgagaatatcactcaatgccagcattttaggcacgtactgcttcgtttcctgcggcaacggtaagctccagaagtccgtggatttcccacgcgctttgttcgttttaattgccttcatgacccgaccttcgccgctgttataagccgctacggtcagaagccagtcgccgtcaaacattttgttcagacgctgcatcatattcagcgcggcagttgtactagcaacaacatcgcgacgcgcgtcataattgcgggtctgtttcaaaccataattgcgccccgtgctcggaatgatctgccagatgcctgcggcattggcgccagacgttgcgtgaggatcaaaagcgctctccactatgggtagtagtaccagttccataggcatgttacgttttttaacttgccctgctatccagtacatatacggctctgcccgtaaagttacatcgtggagatagctcttattgcgtaaatatttctgtttctgttcgcgaatccggtcattttccggaattcccatctttagctcgtcgccaatgaaagcccacaagtcaccatctggcgcgatagacgtcccatcgtccatccatcgtgcctgacttgtaaactttgctgcttccccttgaccagctgcagaaaggctctgtgcgtgctgttgaacgttgccggtactctggcaacccacgagcaggacagaggcgagtaatatcgcttttgccttcatgtgtgtgtcaatagttgcttaaaagacgaccgatcataacggcgaacggagccgatgacaagaaagttttatcagaacctatctttcttactccttaaccatgcaaaacgctcttcaggttgttgcaataatgtttcttcattaattacattaattaaatcaatatcttccgttcttaaaaaaacattaatttgccgctcatttttcagaattacgggtagtgttatttgattttttgcccgtaactccttaactttacgataataatcatttatggacaaatcgtgcggaagaatactcaaagcaaacttcatattacttaaggtatattcatgagcacaacataccaatgtatcgtcaggtaacgcacttaactttttaagactttgatacatttgacttgctgtcccttcaaacaaccgaccacacccaccagaaaacagtgtgtcgccgcaaaatagataaggtttactgaagtaacagatatgtcctaaagtgtgacccggcgtagcaattacactaaattcatgccccaaaacgaaggcagtttcgccatctttgactacctgtgttgttcccttatcttgtgtctcttgtggaccatacaccacaatttgtggaaacttttccaccagttcttttacgccgccaacgtgatcgtggtgatggtgggtgagaaatatggcctccggttgccagttattggcggcaatggcgtttaatactggctctgcgtctccgggatcgacaatcaggcagcgacctgcttcatcattcaaaacccagatgtaattgtcatcaaaggcgggaatactgttaagattcatagattacctctcagtgtgaaacggaaggttgtgatgaaaccggcaagagtccctcaaactgtcgtggctcctgattgctggggcgatttgccctggggaaagctttatcgcaaggcgctggagcgccagctcaacccgtggttcactaaaatgtatggttttcatctgcttaagattggcaatttaagcgcagaaatcaattgcgaagcgtgcgcggtttctcatcaagtgaatgtttctgcgcaaggaatgcccgtccaggtacaggcggacccacttcatcttccttttgccgataaatccgttgatgtttgtctactggcacatacattgccgtggtgcaccgatccgcatcgtttattgcgtgaagccgatcgggtattgattgatgatggctggctggtcattagtggcttcaatcccatcagttttatgggattacgcaaacttgtgccggtattgcgcaaaaccagcccctataacagccggatgtttactctgatgcggcagctggactggctctctttgttgaattttgaagtgctacacgccagccgtttccacgttctcccgtggaacaaacacggaggaaaactattgaatgcgcatattcctgcgcttggttgcttacaacttattgttgcccggaaacggactattcctttaacgctaaatccgatgaaacagagtaaaaacaagccacgaattcgccaggcggttggagccacccggcaatgtcgtaaaccacaggcttaaacttcaacttggtagcctgtatcttccagtgtgggattcatcgccgcggcacgagccagttcatcacagcgttcgttttccgggtgtccggcatggcctttaacccattcccatttgatttgatgctgccccaatgcagcatcaagacgttgccagagatcgacattttttactggttttttgtctgcggttttccagccacgttttttccagttatggatccactgggtgataccctggcggacatactggctgtcggtactcaaaatgacttcgcaatgttcttttaacgcctccagcgcgacaatagcggccatcaactccatacggttgttggtggtgcgggtgtagccagcgctaaaggttttctcgcgtccgcgatagcgtaaaatagcgccgtaacccccaggtcctggattgcccagacagctaccatcggtgaaaatttctacctgtttaagcatctctggtagacttcctgtaattgaatcgaactgtaaaacgacaagtctgacataaatgaccgctatgagcactgcaattacacgccagatcgttctcgataccgaaaccaccggtatgaaccagattggtgcgcactatgaaggccacaagatcattgagattggtgccgttgaagtggtgaaccgtcgcctgacgggcaataacttccatgtttatctcaaacccgatcggctggtggatccggaagcctttggcgtacatggtattgccgatgaatttttgctcgataagcccacgtttgccgaagtagccgatgagttcatggactatattcgcggcgcggagttggtgatccataacgcagcgttcgatatcggctttatggactacgagtttagcttgcttaagcgcgatattccgaagaccaatactttctgtaaggtcaccgatagccttgcggtggcgaggaaaatgtttcccggtaagcgcaacagcctcgatgcgttatgtgctcgctacgaaatagataacagtaaacgaacgctgcacggggcattactcgatgcccagatccttgcggaagtttatctggcgatgaccggtggtcaaacgagcatggcttttgcgatggaaggagagacacaacagcaacaaggtgaagcaacaattcagcgcattgtacgtcaggcaagtaagttacgcgttgtttttgcgacagatgaagagattgcagctcatgaagcccgtctcgatctggtgcagaagaaaggcggaagttgcctctggcgagcataaatacctgtgaaaggcgctaaaaatagcgacttgggcgatttttgcagcaaacgattcaaaagatgagaaaaaccgttgacgaaggtcgaggcaatccgtaatattcgcctcgttcccaacggaacacaacgcggagcggtagttcagtcggttagaatacctgcctgtcacgcagggggtcgcgggttcgagtcccgtccgttccgccactattcactcatgaaaatgagttcagagagccgcaagatttttaattttgcggtttttttgtatttgaattccaccatttctctgttcaatgattttactctggcgtaggtgcgtgattctcgcttgttgtctcattcattaaaattcaataatgatatcgaaccattcagcttaaatatatttctagagaataaatttatattgattaaatgaatgtatatttcaaattgattttgtttgttattatttaagtgaggtatataattagagtccgttatcaatgctaaatattctaatcattatgacaggcgagggagtgtccaattatgaatagtaaaaagctttgttgcatatgtgtgttattcagcctgcttgcaggatgtgcctctgaatcttctattgatgaaaagaagaaaaaagctcaagtcacacaaagtaatattaataaaaacactccccagcaactgacagacaaagatttattcggtaatgaaaccactctggccgtatccgaagaggatattcaagctgcgcttgatggagatgagttccgcgttccccttaattctcctgtaatacttgttcaatccggcaaccgcgcaccggaaaccattatgcaggaggagatgcgaaaatattatactgtttccacattctctggtatcccggacaggcaaaagcctctgacttgtaacaaaaacaaagataaaaatgagaacgaggatgttgccagtgctgagaatatgaactggatgcaggcactgcgttttgtggctgcaaaaggacatcagaaagcgattattgtttaccaggatatgttgcagacaggaaaatatgactctgcgctgaaaagtacagtatggtccgactataaaaatgacaaactcactgacgctatctccctgcgctacctggtacgtttcacgctggtggatgtggcaacaggtgagtgggctacctggagcccggtgaattatgaatataaagtgcttccaccattgcccgacaagaatgaagccagtacgactgatatgacagagcagcaaatcatgcaacttaagcaaaagacctataaagcgatggtaaaagatttggttaaccgctatcaataataaattatatctgccgccaggaatttctggcggcaataatacaaaattctttgcataagaaatttttcttgacaaagacagtgcaagaaaggacatggaatccggagttaaaaactgtttgttttagaatatttaattatttaactgctgaatcttccttgcgagaaatatatccattattacatttcatgccatttttaatatagattgctcctgggaaaattcccgtattattaccgcaggggtgataattagtattgacatatcctgtgacaaaaggagctattaaaggtgctattacgatagctattagtaaaaatataagagttagctgtattgttatgtctgtggcgaaattgactaccttcgtttttttgattaagaatgattttattatcgtaagtaaaattacatgaatatttaaaaaggaaaacgacatgaaaccgaagcacagaatcaacattctccaatcataaaatatttccgtggagcattttattattgaatatagaggtttaactccggtaaaaaacaaagaagcattgaatgcagggaaaaataatatggccataaaaaacatcgaaagaaactcttttaatttaacatgtaaacgcatggttaatcctcatatcacgggtggagtgttaagaacatacataaatggagtcatgttttcccttttccatttatcaagttcctgttgccgttttagtccatctctaattgcatattttaatttttcacttaaatggcattgagcatcgatttcatttaaaacaactgtacacactatccctgtcagtaaaattgctcctccgacaagaattactggaaagccaaagctaacacaggcaaaagaagccagacttccaatagcggttgcaacaccaccggctataactgctttggccacatccatactaaaatcgccaagaaaattaaccagatctcgctcactactcataataaattctatggttctgctgatttaaccgcagagaagttcgccacagcaatccgaaaccactggcacgtggagaataagctgcacaggcgtctggacgtggtaatgaatgaagacgactacaaaataagaagaggaaacgcagcagaattatttagtgggatacggcacattgctattaatattttgacgaatgagaaggtattcaaggcagggttaagacgtaagatgcgaaaagcagccatggacagaaactacctggcgagtgtccttgcggggagcgggcttagctaataataccccgactctccccgtccttaaacacaacccccactcaccacaacctaaactcatccgcatcctgccatgccggaaacttttctctatattcccgcaatgctgccatgctcagctccgcatcaatgcgcgttgcctgatgcgcgtcggcagtagcgataatctctccttgcggattaatcacccggctgtcaccgcgataatggcagccgttgccatcgctgccgacgcgattgcatcccgccacatacgcctgattctcaatcgcgcgggccgtcagcaatgcctgccagtgcagagagcgcggagcaggccagttggcgacgtacagggcgaggtcataatcgttgagattgcggctccacacaggaaaacgtaagtcgtagcacaccagcggcaaaatacgccagccgcgccattccacaatcactcgcgcattgcccgctttataatgtagatgctcatctgccatgcggaacagatgacgcttatcataaaaatgtaccgtgccgcccggctcaaccagcaaaaagcggttaacgctaccagactccgtttgtaatgcaacactgcctgcaatcagcgcattgcactgctgcgccttagctgtcatccagttcactacgtcatcttgtgctaggctgctagctgccgcttccatggcaaagccgctggtaaacatctccggtagaacgatcacatcgcgcccggtaataccttccagttgacgatcaaaatgacgcaggttggcaggaccatccatccacaccagtggttgctgcaaaagcgtaatcttcaaaccaggcacggtgtacaactcctttatgcgaagggttttataactttaacaccttatcaggcagttgccttagcgcagaataaattgataacaaatgctgatattggaaatatctgatttgcaaattatcgtgttatcgccaggctttaggaggttaataacatgggcaggataagcagcggaggaatgatgtttaaggcaataacgacagtcgccgctctggtcatcgccaccagtgcaatggcgcaggatgatttaaccattagcagccttgcaaagggcgaaaccaccaaagctgcatttaatcagatggtacaagggcataagctgcctgcctgggtgatgaaaggcggtacttatactcccgcacaaaccgtaacgttgggagatgagacgtatcaggtgatgagcgcgtgcaaaccgcatgactgtggcagccaacgtatcgctgtgatgtggtccgagaaatctaatcagatgacggggctgttcagcactattgatgagaaaacgagccaagagaaactcacctggctgaatgtgaacgatgcgcttagcattgatggtaaaacggtgttgttcgcggcgttgaccggcagcctggaaaaccatccggatggctttaattttaaataattagcggataaagaaacggagcctttcggctccgttattcatttacgcggcttcaactttccgcactttctccggcaactttaccggcttcgtcgccagctcttccggatcaaagtcatcaacgttaatactgcgcagacggctttcttcagctttcaccagaatagcggcttcatctttatcaatcagccccttcaccagcgcgttgtgcgccagttcatccagacgggtaaacggcaggtttttacccagctctttacagatccgctgatgaattgggtcggcggcaatcacatccaccagcgcctcttccagcaagccaaccggattatgctcgctcggcgtcaggtactgaccgcgaccaatgcgggaacgggtggcgttcggcacttgtaaaatcttcgccactttatgatccagcttgtcagaaggtgccagataatgacgtccggtcgggaagatcaccacattcagcagcccggcaaccacgcggttcgggaagttttgcagtaaatcatccatcgcctgttcagcctgatacagcgcatcttgtacgccccagtgcaccagcggcaggtcggcttcattacggccttcgtcgtcataacgcttcagcacggcagaggcgaggtagagctggcttaaaatatcccccagacgggcgctgatgcgctcgcgacgtttcaggctgccgcccagcactgccatgctgacatcagaaagcagggcgaggttggcgctcaggcggttcaggtgctgatagtagcgtttagtggcatcgccggttggcgtgctgctggttaaaccgcgcgtcaggcccagccagaagctgcgaactttgttgctaccgacgtgaccgatatgtttgaacaacagtttatcgaacgcgttgacgtcattgttcttcgccgcttccatctcttccagcacgtacggatggcaacgaatcgctccttgtccgaagatcatcatgctgcgggtcagaatgttagccccttcaacggtgatggcaatcggtgcgccctggtaagcacgcgccaggaagttgctttgcccgagcataatgcctttaccgccggtaatatccatcgcatcaataatgctctgctgcccgcggtgggtacagtgatacttaacgatagcgctcagcacggcaggtttttcgccgagcataatgccgtaggtaatcaggcttgccgcagcatccatcacgtaggcattaccggcaatacgcgccagcggctcttcaatcccttccatcttaccaatagagattttgaactgacggcgaatgtgagcatacgcgccggttgccagcgctacgcttttcacgccgccggtactgttggaaggcagggtgatgccgcggcctacgctgaggcactccaccagcatccgccagccttgcccggccattttcggcccgccgatgatgtaatcgatcggcacgaagacatctttaccgcgcgtcggtccgttctggaacggtacgttcagcgggaagtggcgacgaccaatttccacgcccggcgtggtggttgggatcagcgcacaggtaatgcctaaatcttctgcaccgccgagtaatttttccgggtcggagagtttaaacgccagcccaagcacggtcgcaatcggtgccagcgtaatgtagcgtttgttccaggtcagacgcatccccagcacctgctggccctgccattcgcccatgcagacaatcccggtgtccggaatcgcgcccgcatcggaacccgcttccgggctggtcagtgcaaagcaggggatctcctgaccacgcgccagacgcggcagatagtgatctttctgctcgtcagtgccgtaatgttgcaacagttcgcccgggcctaaactgtttggcacgccgacggtaatcgccaggatcccgctcacgccggagagtttttgcagcacgcgagactgggcataagcgctgaactccagcccgccgtactcttttttgatgatcatcgcgaagaaacgatgctctttaaggtacgcccacaactccggcggcagatccgccagctcatgggtgatctggaaatcattcgccatccggcaggcttcttctaccgggccgtcgagaaacgcttgctcttcggcggtcaggcgcggctgcggatagttatgcagctttttccagtccggcttgccctggaacaagtcgccctcccaccaggtggtgcccgcatcaatcgcttctttctcagtgcggctcatcggcggcatcaccttacggaaaccgcgaaataccggcgcggaaatcatgctcttacgcataggcgcaaagttaaatggcacgaggataatggccagaggcaccagtacccacgcgctccacagaccagcaacgccgagggcggctgtccaggcgagcaaaatcagactgctgataaataagctcacgcggtgatagaacaacgcgccgagcaggacaaccgtagcgagaatactcaaaatcatcataacgaaaagccccttacttgtaggaggtctgaccacttgtgatgatatggttgtagtggatgtaaaaacatttagcaatatgtttacaatataattacaacaaagctcacattgttgctgtttttatccgcacttcaggtcaaaaagtcctggtcatagcacctgcccgtacttctcgcttttggcggtatccggtacactgcattttgtctattacatttatgctgaaggatatcctcatgtaccaggatcttattcgtaacgaactgaacgaagcggcggaaacgctggctaactttttaaaagatgacgccaatattcacgccattcagcgcgcggcggtcctgttagcagacagctttaaagccggtggcaaagtgctttcctgcggcaacggcggttcccattgcgacgctatgcactttgccgaagagttgaccggtcgctaccgtgaaaaccgtccgggctacccggcgattgctatttctgacgttagtcatatttcctgcgtcggtaatgatttcggtttcaatgatattttctcccgctacgttgaagcggtaggtcgcgaaggcgatgtactgctggggatctccacctccggtaactctgcaaacgtgatcaaagcgatcgcagcggcgcgtgagaagggaatgaaagtgatcaccctgaccggtaaagacggcggcaaaatggctggcacggcggatatcgaaattcgcgtaccgcactttggttatgccgaccgcattcaggagattcacattaaagtgatccatatcctgatccagttgattgaaaaagagatggttaagtaagtctggcgtaggccggataagacgtttacgccgcatccggcatttgtgcgctgatgcctgatgcgacgctgacgcgtcttatcatgcctacaaatctgtacgcgaaccgtaggccgaataatgcgttcacgccgcatccgacctgaaaattcttaaatcaatcttcgccgggggccatgcgctcccgctgttgtggaggttacccatgtgcgaattgctcgggatgagcgccaacgtccctaccgatatctgctttagtttcaccgggcttgtacagcgtggtggtggaaccgggccacataaagatggctggggcattaccttttacgaaggtaaaggctgtcgcacatttaaagatccacaacccagctttaattcccccatcgccaaacttgtccaggactacccgataaaatcctgtagcgtggtggctcatattcgccaggctaatcggggcgaggtggcgctggaaaatactcacccatttacccgcgagttatgggggcgtaactggacttatgcccataacggacaactgacgggctacaaaagtctggaaaccggcaacttccgcccggtaggcgaaaccgacagcgaaaaagccttctgctggctcctgcataaattaacgcagcgttacccgcgcacaccgggcaacatggcggcggtatttaaatatatcgccagtctggcggatgaactgcggcagaagggcgttttcaacatgctgcttagcgacgggcgctatgtaatggcgtattgcagcactaatttacactggatcacccgccgcgcgccgtttggcgtggcaacgttgctggatcaggatgtggaaatcgacttcagcagccagaccacaccgaatgatgtggtcacggtgattgcaacacagccgctgacgggcaatgaaacctggcaaaagattatgccaggcgaatggcgcttattttgcctcggggagcgtgtagtttgattattttgcctcggggagcgtgtagttacttgccagttgtggctgcacaacttcgtggcttaacggcttgctgaccacgtaacgaccattgaccacagaaacggttggtggcttacgggtttgctcaaagtagtcgtaacccggcttcagttgctcccagaagtccttaaagttggaatatttatggcgcttcatattggcgtcggtcatgcggaacgggtaaatactcacttgcacgctcggctgaccaaacaccagcgcaccagtaacgaactggaatatctcatcaataccctgattggtcattgcgtagcagccgatggaaacacaatcgccgtggatcatcaggtatttcccttcataaccatgcgcacggtcataggcattggggaaaccaatattaatcgctttgtagtaacggctgtctggttttaactgattacgctggacgctataaaacccttccgggcttttgaaatcgccctgacgctgttttggccctaagccgccggaatatttacagattttatagctgtcgagcagttgatattgctcgcccattttgacgtagagatcgagcgtacgttcttccttgaagatctggatgtagacaggggatcccatcaactgctgcttatactctttgctcacaggcgtggtagagctactgctgcccagcaaaccggcaaaactaacgcacgggatcaacaacatcgcaagaattaatgcgattttacgcatactgcttattccttgataaaacggttacacacgccaggacggcaaaatggatcccaaatcggaatagtctggatttggaaggctcacattatcaccaaaagagttttacgcaagcctgtcggcgcagggtttacaaatttcatcggaagcgggctttacccaaagagcgccgcgtgagttccagttctctcaaatcgtaaaagtttatcggtaagtttgtaaatcaggatccagtccggttcgacatgagcatcgcgataacctttccaactaccttgcagcgggtggtctttataaacagctggaagcggtaaagtattattgataagaagcgtcataagatatttcaatttattcatatccttatgacgcttttgtgcaagttttacatccttactatattgtccgctgtattcaatatccctttgaatcatatttaaattcctaatttatcaaataaatcatcggcgtctttggccttatgaacatcaatgccagcttcgctgtttttgatactttgaatggttaattgattaggctcgcgtaaatcaaacggcaatgccttttcacgcgcgacctttgtgagggttatgcgaaccaggtcagagatggtcagccccatcccggccagtacgtccgctgcctgattcttcagatcttcatcgattcgggcgcgaacaaacgcgttagcagccattggggtatctcctgtgctgtatatttattcagcttgaattgtagctcaaatgagcaacagcgacaatccatgagtaatttaataaacggatgtttttacataattaactgaaatatatatgttaattttataataatggtttattaagtttgttcagaaacgatccgggatacactgcaacattaaagcatgaccagccattattgagtatgtccttgccgagcattccatcctttgtattgagcggattactgttgatttgtttgccgttttctagttttgccagcgccaccacaagtcatatctctttcagctacgccgcccgccagcggatgcaaaaccgtgcgcgtttattaaaacagtaccaaactcatctgaaaaagcaggccagctatattgtggaaggcaatgccgaaagcaaaagggcgctacgccagcacaaccgggagcagataaaacagcatccagaatggtttcctgctccgctcaaggcgagtgacagacgctggcaggcgctggcggaaaacaaccactttttaagcagcgaccatctgcataacattaccgaagtggcgattcaccgcctggagcagcagcttggcaagccttacgtctggggcggtacgcggcctgataaaggctttgactgtagcgggttggttttttatgcctacaacaagatccttgaggctaagctcccgcgcacggccaatgagatgtaccactatcgccgggcaacgattgtggcgaacaacgacctgcgccggggagatttgctgtttttccatatccacagccgcgagatagccgatcatatgggcgtgtatttgggcgatgggcaatttatcgagagcccacgtaccggcgaaaccattcggataagccgattagccgaacctttctggcaggaccattttttgggcgcgcgcaggattttgacggaagagacgattttgtaagacggataaggcgtttacgccgcatccggcagttgtacgcaggtgcctgatgcgacgctggcgcgtcttatcatgcctacgagcccgcgaatatttgcgagccgctttcccgatataaaacaacctcattgccaacctttccttttcttcttaccgttgagaaaaaggagtcgccatgtctgaatatcgtcgttattacatcaaggggggaacatggtttttcacggtgaatttacgaaatcgtcgaagccaacttttgaccacccagtaccagatgctccgtcacgccattattaaagttaagcgagacaggccttttgaaatcaacgcctgggtcgttttgccagagcatatgcactgtatctggacattacctgaaggcgatgatgatttttccagccgctggcgggaaattaaaaagcaatttacccatgcttgtggattgaaaaatatctggcaaccacgtttttgggagcacgccatccgcaataccaaagattataggcatcatgttgattatatttatataaatccagtaaagcatggttgggtaaagcaagtgagtgattggccattcagtacgttccatcgcgatgtcgcgcgagggttatatcccatcgattgggcgggggacgtaacggattttagtgccggggagcgtatcattagttaattgtgcgcagatgcctgatgcgacgctagcgcgtcttatcatgcctacaaacttgtgccggatcggtaggccggataaggcgtttatgccgcatccggcagttatgcgcagatgcctgatgcgacgctggcgcgtcttatcatgcctacaaacttgtgcctgaacggtaggacggataaggcgttcacgccgcatccggcagttgtgcaccaatgctggatacttacatcaacgcccccataatcttcaactccagctcatccggcacttcgttatacgacagcacatgcagccccggcgcaaacaaccttgcataacgcgccagcaaagggcgcagctgcggtggcaccagcagcaccgggtctttccccgccgctttcatctgctctttcacctgtggcatcgtactctggaactggttgagcatattcggatcgaccggcacgctgtcgagcatcactttcccgccctgttgcgcctgattcaccacgttggtcagcagattttccagctcattattcagcgtatacaccgtcagctcctgcttgcgaacgaacggatgggtaatgctgcgccgcaatgccaggcgcacatcggccgccagcagaatatgatctttcgtcaccgtgctactggcgaccagcacggtggcgatggtgacgatatcgcgcagggaaacgccttcggtcagcagcgcccggtacactttcagcaactggctgtaattgagcgccgcgctcaaatcttccgccagacgcggtgccgtcgacgataaacggttatgcaactgcgtaatatcatcatagttaaacaaatcaggaatatagctgcgcacaatcttatttacatgggtagcgatcacgctggcgctgtcgatcacctgataccccatattcagcgccttcgctttctgcgccgcctggatccaggtgaccggcatcccgtacgccgggtcgttcccctgcacgccgtcaatctcgccgtaggtttcgctggagggcagggccatcagtttatccgccggaatatccgcttcatcagcctttatgccgttgatgaaaatggcgtactgactgggcttaaggcggaagttttcccgaatgcggatctccggcagcagcacgccgttgccgtcagaaatcacctgccgcacgccgcgaatccgctgggtgagcgggttaccctgtgctttgtccaccagcgccaccagtttgtaaccgaggcttaaactgataggctcgatcagcggaatggtttcccaactgacctgctgctcgctggtttcggtgatggtgcgggtcagcgtttcgaggcttttctcttccgcctccgccgccagcggctgtttgctcatccgccagccggtaaaaccaagcagggcgctgaacagcaaaaacggcaggtgcggcattcccggtaccaccgccagcacgaacataatcccggtggcggtgtagagcaccgacgggcttgccagcagctggttacgcacgtcatgggcgatatcgccgttgtcgctgacgcgggtgacgataatcgccgccgcggtggagagcagcagggaagggatctgcgccaccaggccgtcgccgatggtcatcagcacatactgctggaaggcagcatcggcgctcaggttgtatttgaagatcccgatacagacgccgccgatcaggttgatcgccagaatcatcatcccggcgatggcgtccccgcgcacaaacttcgatgccccgtccatcgcgccgtagaaatcggcctcgctggcaacatctttacgccgggtttgcgcctgcgcctggttgatcaatccggcgttaagatcggcgtcaatcgccatctgtttgccgggcatcgcgtctaaggtaaagcgggcagaaacctcggaaatacgctcggcccctttggtgacgacaataaagttgattgtcaacagcgtcagtaaatccgagcgtgaaagcattatcgccgcgctgcacgggcagtcgatttttaacggtggtgggctgtcgccgttaaataaaatcagcccgtctcatccgccaaaacctgccaccgtggcggtgccggaagagacggagaaaaaagcgcgtgatgtgaatgagaaaacggcgctgctgaagaagaaatccgccaccgagcttggtgagctggcaaccagtatcaacaccattgcccgtgatgcgcatatggaagcgaatctggagatggagattgttccccagggattacgcgtgctgattaaagacgaccagaaccgcaatatgtttgaacgcggcagcgcgaagattatgccgttctttaaaacgctgctggtggagctcgcgccagtgttcgactcgctcgataataaaattattattaccgggcataccgatgcgatggcctacaaaaacaatatctacaacaactggaacctttcgggtgaccgcgcgctttcggctcgtcgggtgctggaagaggccggaatgccggaagataaagtgatgcaggtaagcgcaatggcggaccagatgctgctggattccaaaaatccgcaaagcgcgggcaaccggcgcattgagattatggtgctgaccaaaagtgcgtccgatacgctgtatcaatactttggtcagcatggggataaagtggtgcagccgctggtgcaaaagctggataagcagcaggtgctttcgcagcgaacgcgttaaatgctgaatctttacgcatttctcaaaccctgaaatcactgtatactttaccagtgttgagaggtgagcaatgcgtaaaatcattcatgtggatatggactgctttttcgccgcagtggagatgcgcgacaatcccgccctgcgcgatatccctattgctattggcggcagccgcgaacgtcggggggtgatcagcaccgccaattatcccgcgcgtaaatttggcgtacgtagcgctatgccgacagggatggcgctcaaattatgcccacatctcaccttgcttccggggcgctttgacgcctacaaagaagccagtaatcatatccgtgaaatcttcagccgctacaccagccgcattgaaccgttgagtctggatgaggcttatctcgatgtcaccgatagcgtccattgccacggttctgcgaccctcatcgcccaggaaatccgccagacaatcttcaacgagctgcaactgacggcgtctgcgggcgtggcaccagtaaagtttctcgccaaaatcgcctccgacatgaataaacccaacggccagtttgtgattacgccggcagaagttccggcatttttacaaaccttaccgctggcaaaaatccccggcgtcggcaaagtcagtgcggcaaaactggaagcgatggggctgcggacctgcggtgatgtacaaaagtgtgatctggtgatgctgcttaaacgctttggcaaatttggccgcattttgtgggagcgtagtcaggggattgacgaacgcgatgttaacagcgaacggttgcgaaaatccgtcggcgtggaacgcacgatggcggaagatattcatcactggtctgaatgtgaagcgattatcgagcggctgtatccggaacttgaacgccgtctggcaaaggtaaaacctgatttactgattgctcgccagggggtgaaattaaagttcgacgattttcagcaaaccacccaggagcacgtctggccgcggctgaataaagctgatctaatcgccaccgcgcgtaaaacctgggatgaacgccgcggcgggcgcggtgtgcgtctggtggggctgcatgtgacgttgcttgacccgcaaatggaaagacaactggtgctgggattatgatgtatactattatgtatattctggtgtgcattattatgagggtatcactgtatgcatcgaattctcgctgaaaaaagcgtcaatatcactgagttacgtaaaaacccagctaaatactttattgatcaaccggttgcggttctttctaataatcgccccgcaggatatctcttaagtgccagcgcattcgaagcgttaatggacatgcttgctgaacaagaggagaaaaagcccataaaggcgcgcttccgtccaagtgctgcaagattagaggaaattacacgccgcgctgaacaatatcttaatgatatgacggatgatgatttcaatgactttaaggaataaggatgcgggtattcaaaacaaaacttattcgcctgcaacttacagcagaggaacttgatgcgttaacggcggattttatttcctataagcgtgacggtgttttgccagatatatttggtcgcgatgcactctacgacgactcctttacctggccattaatcaaatttgagcgagttgctcatattcatctggcaaatgagaataatccatttccgccacagttgcgccaattcagcagaacgaatgacgaagcgcatttggtatattgtcagggggcgtttgatgagcaagcatggttgctcattgccattctgaaacctgaacctcataaactggctcgagataacaaccaaatgcataaaattgggaaaatggcagaagcgtttcgcatgcgtttttgaatttatattatgaataacatacaaataagaaactatcagcctggcgattttcagcaactatgcgctattttcattagagcggttacgatgaccgccagtcagcattatagtccacaacaaatttccgcctgggcgcagattgacgaatctcgctggaaggagaaactcgcgaaaagtcaagtgtgggttgcgatcattaatgcacaaccggttggttttatttcccgcattgaacattatatcgatatgttatttgttgaccctgaatacacccgccgtggggttgccagcgctttgttaaaacctttgattaagtctgaatccgaacttacggtggacgcaagcataaccgcaaaacccttttttgaacgttatggttttcagacagttaagcagcagcgcgttgaatgccggggagcgtggtttactaatttttatatgcgatataaaccgcaacattaaatccagcttgcaatgaaaataacgcccgcctggtatgtgcgcgttttctgattccacaaactgcaaggaggtaaatcatgacaaatcctttatcaatgactctttgcagacctttccaggattaattctttttttcttgccctggattcgtctgccatttcctgatttttatatttatatactctaaataattcgagttgcaggaaggcgacaagcgagtgaatcgccaggagcttacataagtaagtgactggggtgaacgaacgcagtcgcagtacatgcaacttgaagtatgacgagtataaatggaatggtacatgggcaaatatattcgtcccttatccgatgcggtatttaccatcgcatctgatgacctgtggatcgagagtttagcgatccaacaattacacaccacggcaaatttacccaacatgcagcgcgtagtggggatgccagatttacaccccggacgcggctacccgattggcgcagcgttcttctctgttggtcgtttttacccggcaagacgtcgcggtaacggtgctggaaacagaaacgggccgctactctgacacactgcgtagcgcgctggtttctctcgatggcgataacgcatgggcattaagcgaaagctggtgtggcactattcagtggatttgtccgagtccgtatcggcctcatcatgggcgcaaaaactggtttctgggcattgggcgttttaccgctgatgagcaggaacaaagcgatgcaatccgttatgagacgctgcgtagcagcgggccgggcggtcaacatgtcaataaaaccgacagcgcggtacgcgccacgcatttggcatccggtattagcgtgaaggttcagagtgagcgtagtcagcatgctaacaagcggctggcacgattgctgattgcctggaagctggagcaacagcaacaggaaaatagcgcggcgctgaaaagccagcggcgaatgttccatcaccagattgaacgtggcaacccgcgacggacatttacagggatggcttttatcgaaggataatgaaggatgaaactgccggaaggcgattaaacgccatccggcagcaaatcaaataattacttcgccggaatttctttcagcagttcagtcagcagtgtccagtaatgacctacgctttcgatgtgaacttgctcatccggagagtgtggaccggtgatagttggcccgatagaaaccatgtccatttccggatacggttttttgaacagaccacattccaggcccgcgtggataatctggatgttcggcgtcttgttgaacaggcgctgataggtttcacgtaccagatgcatcaccggagaattagcgtccggctgccagccaggatatgcgcctttcgcttcggttttcgcgccagccagtttacccaggctatccagcatgctcaccacgtagtctttaccgctgtcgatcagactacggatcaggcagtgaatttctacgttattgtcagtcatggtcaccacaccgacgttcagggaggtttcaaccacacctttggctacatcggagttacgaatcacaccgttcggggtggcgttcagcagacgaataaaggtatcgcgagatttcgcaatcagggcagctttatcgttcgctacagagtccagcaacaaggccagatttttctctttttctgccagctcgtttttcaggatctcctgataggtattcaccagagatttcaggacgtcgactttatcagctgcgacagcaatggtcgcaaaggcttcacgcgggatggcgttacgcagtgtgccgccgttgaaatcgataaggcgcagatccagttcttccgcatgacccgccaggaagcgcaccagcagtttgttggcattacccagcccaacgtggatttccccgccggagtgaccgcctttcagaccttttaaggttaacttgaaggtttcaaaaccagctggaaccgcttcacgatctaaatgcaggttggaggtgaagtcgataccccccgcacaacccatgtagatttcaccttcttcttcggagtcggtgttaatcagaatatcagcctgcaaccagttgccctgtaagccgaacgcaccgtccataccggcttcttcggtcatggtcagcagcacttccagcgggccgtgaaccacgttttcgtcagccagaaccgccagcgcagaggccataccaatgccgttatccgcacccagcgtggtgccgcgcgctttaacccattcgccatcaatataaggctggataggatctttcgtgaagtcatgcacggtgtcgttatttttctgcggcaccatatcgaggtgggcctgtaagacgaccggtttacgattttccatacctgcggtagcaggtttacgaatcaggatattacctacctgatcgcgttcgacatggaaacctttctcttttgcccaaccaacaatgtattcagcgagttgctcttcatgataggacgggtgaggaatagaacagattttggcaaaaatatcccacagcggctgtggagataattgagacagttcagacacgttaagtctccttgtcgatcacccgcaaaacagtattgcaggtcacagggttagcagaaaatgttgtcaacacaagacaggcttgcgagatatgtttgagaataccactttatcccgcgtcagggagaggcagtgcgtaaaaagacgcggactcatgtgaaatactggtttttagtgcgccagatctctataatctcgcgcaacctattttcccctcgaacactttttaagccgtagataaacaggctgggacacttcacatgagcgaaaaatacatcgtcacctgggacatgttgcagatccatgcacgtaaactcgcaagccgactgatgccttctgaacaatggaaaggcattattgccgtaagccgtggcggtctggtaccgggtgcgttactggcgcgtgaactgggtattcgtcatgtcgataccgtttgtatttccagctacgatcacgacaaccagcgcgagcttaaagtgctgaaacgcgcagaaggcgatggcgaaggcttcatcgttattgatgacctggtggataccggtggtactgcggttgcgattcgtgaaatgtatccaaaagcgcactttgtcaccatcttcgcaaaaccggctggtcgtccgctggttgatgactatgttgttgatatcccgcaagatacctggattgaacagccgtgggatatgggcgtcgtattcgtcccgccaatctccggtcgctaatcttttcaacgcctggcactgccgggcgttgttctttttaacttcaggcgggttacaatagtttccagtaagtattctggaggctgcatccatgacacaggcaaacctgagcgaaaccctgttcaaaccccgctttaaacatcctgaaaccagcacgctagtccgccgctttaatcacggcgcacaaccgcctgtgcagagcgcccttgatggtaaaaccatccctcactggtatcgcatgattaaccgtctgatgtggatctggcgcggcattgacccacgcgaaatcctcgacgtccaggcacgtattgtgatgagcgatgccgaacgtaccgacgatgatttatacgatacggtgattggctaccgtggcggcaactggatttatgagtgggccacccaggcgatggtgtggcaacaaaaagcctgtgcggaagacgatccgcaactcagtggtcgtcactggctgcatgcggctacgttgtacaacattgccgcctatcctcatctgaaaggagatgacctggccgagcaagcgcaggctttgagtaaccgcgcctatgaagaggccgctcagcgtctaccgggcacgatgcggcagatggagtttaccgtacccggcggtgcgcccatcaccggctttttgcatatgccgaaaggcgatggcccgttcccgacggtattaatgtgtggtggtctggatgcgatgcagacggactattacagcctgtatgaacgttattttgcgccgcgcggcattgcgatgctgactattgatatgccgagcgtgggcttttctagtaaatggaagctcacccaggactccagcctgttgcatcagcacgtcttaaaggcgctgcctaacgtaccgtgggtggatcacactcgcgtcgcggcctttggtttccgtttcggcgctaacgttgccgtgcgtctggcataccttgaaagcccgcgtctgaaagcggttgcctgtcttggtccggtagttcataccctgttgagtgattttaagtgccagcaacaggtgccggaaatgtatcttgacgttctggccagtcgtttggggatgcatgatgcttccgatgaagcgttgcgcgtggagctgaatcgctatagtttaaaagtgcaaggattgctgggacgtcgctgcccaacgccaatgttaagtggctactggaagaacgatccgttcagcccggaagaggacagtcgcttaatcaccagtagttctgctgacggtaaattattagagatcccatttaacccggtgtatcggaattttgacaaaggtcttcaggaaatcaccgactggatcgaaaaacgcttgtgttaaaaatttgctaaattttgccaatctggtaaaacagttgcatcacaacaggagatagcaatgacgttaccgagtggacacccgaagagcagattgatcaaaaaatttaccgcactaggcccgtatattcgtgaaggtaagtgcaaagataatcgattctttttcgattgtctggctgtatgcgtcaacgtgaaaccggcaccggaagtgcgtgaattctggggctggtggatggagctggaagcgcaggaatcccgttttacctacagttaccagtttggtctgttcgataaagcaggcgactggaagagtgttccggtaaaagacactgaagtggttgaacgactggagcacaccctgcgtgagtttcacgagaagctgcgtgaactgctgacgacgctgaatctgaagctggaaccggcggatgattttcgtgacgagccggtgaagttaacggcgtgagtgaaatgtgccggatgcatcacatccggcaatattcattaaaactgatacgtcatgccaaccgcgacaatatcatcattattaatattcaatttgttatcgctatccagttggttgattttataatcaacaaacgcactcatatttttgttgaaataatacgtagcaccgacgtcgatataattgaccagatcttcatcaccgataccttcaatatctttccctttgcttaagacataacccaggcttggacgcagaccaaagtcaaactggtattgagcgaccgcttcaaagttctgtgtcttattggcaaagccgccagttattggcgtcattttgcgtgtttcagaatagaaagttgccagataaatattattggcatcgtatttcagacctgttgcccatgcttctgcacgcttgcctgtgccacggctttgcaggttctgctcgttggtgcgatcactgttggtataggccccactaatggcgaaatcgctgccgccaaagtcatatgtcaaactcgtgccgaagccatcgccgttttgctttttaacgtcgcggttttcgtttttcccttgatattgcagggttaagttcaggccatcgataacgccgaagaagtcggtgttccgatacgtcgccagaccgctggcgcgtttggtcataaagttgtcggtctgcgcgctggaatcgccaccaaattccgggaacatatcggtccaggcttccacgtcatacaacgcccccaggttacgaccataatcgaaagaacccaaatctttatatttcaacccggcaaaagcgagacgcgttttttgctgtgcagtatcactctctgctttattaccggcaaactctgcttcccaacgaccataaccagtcagttgatcgttaatttgtgtttcgcctttgaaaccaaaacggatataactctggtcgccatctttactggcgttatcactcatataatgcatggctttaactttgccatagacatccagtttattaccgtctttattatatatttctgcagcctgtacagatgcagatgccacaatgcccatcaccactaatgccagagtgctctttttcattttcattcctgattttaattaacgcgcgaatattcagcgggagagtcccgttgaaaacaggaaagtttttaacctgagattgttaaagatatattacagattaataatattcttaaaatgtggtaatttattaaatctgtaataaaagcgtaaacaactgccgctaggcttgctgatcccgcgcaacaaaacgccatgctttgctcgcagatggttggcaaccgacgacagtcctgctaaaacgttcgtttgatatcatttttcctaaaattgaatggcagagaatcatgagtgacagccagacgctggtggtaaaactcggcaccagtgtgctaacaggcggaagccgccgtctgaaccgtgcccatatcgttgaacttgttcgccagtgcgcgcagttacatgccgccgggcatcggattgttattgtgacgagcggcgcgatcgccgccggacgtgagcacctgggttacccggaactgccagcgaccatcgccagcaaacaactgctggcggcggtagggcagagtcgactgattcaactgtgggaacagctgtttagcatttatggcattcacgtcgggcaaatgctgctgacccgtgctgatatggaagaccgtgaacgcttcctgaacgcccgcgacaccctgcgagcgttgctcgataacaatatcgttccggtaatcaatgagaacgatgctgtcgctacggcagagattaaggtcggcgataacgataacctttctgcgctggcggcgattcttgcgggtgccgataaactgttgctgctgaccgatcaaaaaggtttgtataccgctgacccgcgcagcaatccgcaggcagaactgattaaagatgtttacggcattgatgacgcactgcgcgcgattgccggtgacagcgttagtggcctcggaactggcggcatgagtaccaaattgcaggccgctgacgtggcttgccgtgcgggtatcgacaccattattgccgcgggcagcaagccgggcgttattggtgatgtgatggaaggcatttccgtcggtacgctgttccatgcccaggcgactccgcttgaaaaccgtaaacgctggattttcggtgcgccgccggcgggtgaaatcacggtagatgaaggggcaactgccgccattctggaacgcggcagctccctgttgccgaaaggcattaaaagcgtgactggcaatttcagccgtggtgaagtcatccgcatttgcaacctcgaaggccgcgatatcgcccacggcgtcagtcgttacaacagcgatgcattacgccgtattgccggacaccacagccaagaaattgatgcaatactgggatatgaatacggcccggttgccgttcaccgtgatgacatgattacccgttaaggagcaggctgatgctggaacaaatgggcattgccgcgaagcaagccagctataaattagcgcaactctccagccgcgaaaaaaatcgcgtgctggaaaaaatcgccgatgaactggaagcacaaagcgaaatcatcctcaacgctaacgcccaggatgttgctgacgcgcgagccaatggccttagcgaagcgatgcttgaccgtctggcactgacgcccgcacggctgaaaggcattgccgacgatgtacgtcaggtgtgcaacctcgccgatccggtggggcaggtaatcgatggcggcgtactggacagcggcctgcgtcttgagcgtcgtcgcgtaccgctgggggttattggcgtgatttatgaagcgcgcccgaacgtgacggttgatgtcgctagcctgtgcctgaaaaccggtaatgcggtgatcctgcgcggtggcaaagaaacgtgtcgcactaacgctgcaacggtggcggtgattcaggacgccctgaaatcctgcggcttaccggcgggtgccgtgcaggcgattgataatcctgaccgtgcgctggtcagtgaaatgctgcgtatggataaatacatcgacatgctgatcccgcgtggtggcgctggtttgcataaactgtgccgtgaacagagcacaatcccggtgatcacaggtggtataggcgtatgccatatttacgttgatgaaagtgtagagatcgctgaagcattaaaagtgatcgtcaacgcgaaaactcagcgtccgagcacatgtaatacggttgaaacgttgctggtgaataaaaacatcgccgatagcttcctgcccgcattaagcaaacaaatggcggaaagcggcgtgacattacacgcagatgcagctgcactggcgcagttgcaggcaggccctgcgaaggtggttgctgttaaagccgaagagtatgacgatgagtttctgagtttagatttgaacgtcaaaatcgtcagcgatcttgacgatgccatcgcccatattcgtgaacacggcacacaacactccgatgcgatcctgacccgcgatatgcgcaacgcccagcgttttgttaacgaagtggatagctccgctgtttacgttaacgcctctacgcgttttaccgacggcggccagtttggtctgggtgcggaagtggcggtaagcacacaaaaactccacgcgcgtggcccaatggggctggaagcactgaccacttacaagtggatcggcattggtgattacaccattcgtgcgtaaataaaaccgggtgatgcaaaagtagccatttgattcacaaggccattgacgcatcgcccggttagttttaaccttgtccaccgtgattcacgttcgtgaacatgtcctttcagggccgatatagctcagttggtagagcagcgcattcgtaatgcgaaggtcgtaggttcgactcctattatcggcaccattaaaatcaaattgttacgtaagatcttatcattctcccaccaaaaaattatcttaatgtaacagctggtgtaagtaaattctatcaacgaagatcaatcttatctactgaccaaaaaggcctgatagggcttcgctcactatacatccttggctgcaggtttagttgtacaccactcctaaatttaatgtgttggcaatgtgttcaataaagctcgaacaaattagctcattatgatcggttaatacttcaacttctggttgcatgattgtttgtccgtaaaaagataacgcgcctgccgggtagtagcaggcgcattacgcaataggtaaacaagggaggaagttcagaaatgtaaatcgggaaggttgtacgcaatgttcatcgtactacgttgttacggctttgccgcaacaagccagttgcctgccgcgctcgcagaatgtctgcagcccggagataaggagattgttcctgccagctaaatcccttcctgtcgatacgaaccagctcgtatttttctaccagaaaattcacggcatcggctagggtgataccggcatcgatagtctgtatcaggaatgttcgggttaaatatcagcaaaaagcccgcatcatgaatactggatatgaagcatgagagttacctcagtgtttatataaggattcggtccccctctctggaacggtaactctcaatctgatcggttcctgcgttagttcacatcacgactcattttttcgctctcaccggcatcccatttgccacaaaatatcccgccgtgctcctcggcagcgcttcctgtccacgaatcatatccgctattttctcgccaatcataattgtcgtggcgttcaaattcccggtgataatctgcggcataatgctcgcatccaccacacgcaggccttctaacccgtgtacgcggccttcgccgtcaaccacggacatctcgtcgtaacccattttgcaggtaccgcacggatggaaggcggtttcggcgtggttacgcacgaactcatcgagctgttcatccgtctggcattcgacaccggggctgatttcgcggccacgatactgatccagcgcgggttgatgcatgatctcgcgggtgatgcgaattgcgtcgcggaactcctgccagtcctgctcgtggctcatgtagttaaacagaatcgccggatgctggtgcgggtcgcgggatttaatccgcacatgcccacggcttgggctgcgcatactgccgacgtggcactggaaaccgtgctctttcactgcattgctgccgttatagttaatcgctactggcaggaaatggtactgaatattcggccacgcaaattcctcacggctgcgaataaatccacctgcttcaaagtggttgctggcaccaacgccagtgccgccaaacagccactccgcaccgattttcggctggttccaccactgcagggcagggtagagggaaaccggttctttgcactcatattgcagatacatctccagatgatcctgaagattttcgccgacgccgggtaattcatgcaccagcggaatatcaaactccgccagcagttcagcgttgccgacgccggagcgttgcaggatctgcggactggcaatcgcgcctgcacataacagcacttctttgttggccgttgcgcgggttgggatggtgctgtcgccttccagccattcgacgcccaccgcgcgtttgccgtcaaaaatgatgtgatcggtcatagcgtgagtacgaatggtcaggttaggacggcttttggcctgatcgagatagccacgcgcggtgctggcgcgacggccctgcggcgtgacggtgcgatccatcggaccaaaaccttcctgctgataaccgttgagatcgtccgtgcgcgggtagcccgcctgcacgcccgcttcaatcatcgcttcaaacagcggattgacgccgggtttggaggtagtgacgctcaccgggccatcaccgccgtgatagtcgttttcacccatatcgcgagtctcggccttgcggtagtagggcaggcagtcgaggtagctccagttctccagaccgggttcttgcgcccagttatcgagatccagcgcattgccacggatgtagcacatgccgttgatcaggctgcttccacccagacctttaccgcgtccgcactccatgcggcggttattcataaacggttcaggttccgtttcataggcccagttgtagcgtttaccctgtagcgggaatgccagggcagcgggcatctgggtgcggaagtcaaagcgatagtccgggccgcccgcttcaagcagcagcacggaggtattcggatcttcagtcagacgggtagcgagaacgttgccggcactgccggcaccaataatgatgtagtcaaattgcaaataaacctcctggttagaatatggactggaatttagccatctcaacctggatggacttcacctgggtgtaactctggagcgtcatcacgccgttctcgcgaccaatgccggagtgtttgtagccgccaacgggcatctctgccggggattcgccccaggtgttgatccagcaaatacccgcttccagctgatgaatgacgcgatgcgcgcggttcaggtccgctgtcacgatgcccgccgccaggccgtagtcggtatcgttagcgcggcgaatgacttcgtcttcgctctcgtaggtcagaatggacatcactggcccgaagatctcttcacgcacgatggtcatatcgtcgctgcaatcggtgaacactgtcggtgcaacccatgcgccgttatcgaagccatcgcctttcagtacatcgccgccgcacagtacgcgcgcgccttcctctttgcctttggcgatatagcgcagcacgttatcgcgatgcgggaagctgaccagcgggccgaagttagtttgcggatcgaaaacgtcgcccgcgcgaatgcgctcaacgcgcgccagaattttctgctcaaatgcggctttgcatttcgccggaacgaagacgcgggtgccattggtacacacctgaccggagctgaagaagtttgccatcatggcgatatcggcggcgagatcgagatccgcatcatcgaaaacgatcagcggacttttaccgcccagttccatggtcacttctttcagggaagaggccgcgctgttagccatcacttttttgccgctggcgacaccgccggtaaaactcactttggcaatgcccggatgctcggtcagatattgcccggtctccgcgcccacgcccggcaacacgttaaatacgccgtccggcaggcccgcttcgctgtaaatttcagccagctttaacgcggtaagcggggtaacttcgctcggtttgaaaatcattgcgttgcctgccgccagcgccggggcggatttccacagggcaatctggatcgggtagttccatgcgccaatccctgccactacgcccagcggttcgcggcgggtatacacaaaggacgtttcacgcaacgggatctggctgccttccagcgccgggatcagcccggcgtagtactccagcacgtccgcaccggtaacgatatcgacggtactggtttcgctatatgcttttccggtgtcgagggtttccagttttgcgagttcgtcattgcgttcacgcagaatatcaacggcccgacgcagaatacggctgcgctccatggcggtcatgctcgcccagattttttgcccctgctgggcgcttttcacggcgcgatcgacatcctcgcgcccggcggcctgcacggtcgccagcacgttaccgttggccgggttaatggtctcgaaggtgcgaccgctggtggcggaggtataaccaccatgtatataaagctgctgttctgccattcgggacatcacgtctcctcggttaatcggtgggtagatgctgagtgataaagtggcgggtcagggaattagcgcgggttttatccagcggtttgccgctcagagccgcgcgcagccataatccatcaatcagcgcggccaggccgtagcccgcttcctgtgcctgttcgcgcggcaattcgcgacgaaactcgctcaccagattgctcagcaagcggcggctgctgacctgctgtaaacgatagagcatcggctgatgcatactgctggcccagaacgccagccaggctttcatcgccgcactgctcacctgcgtttcatcgaagtttccgccaacaatcgcctgtaatcgctgctctgcactgccctgcggaagtgcatgtaatcgattcaaaaccgcgtcacgcagctgactggtgatatcgcgcatggttgcttccagcagaccatttttgtccctgaaatagtggctgatgatccccgtagaaacgcctgcacggcgggcgatctgcgcgatcgttgcatcgtgcatgcccacttcatttattgcttccagtgtggcgtcgatcagttgtctgcgccggatgctctgcatccccaatttgggcattttcgccactccattcatcagcggtgtttatctattaaagcggttattgattggacgttcaatataaaatgtgtcttaattgttacgaatttgattttaaatagtaacaataacagtggggatactggatgacagaccttagtcacagcagggaaaaggacaaaatcaatccggtggtgttttacacctccgccggactgattttgttgttttccctgacaacgatcctgtttcgcgacttcagcgccctgtggattggccgcacgctggactgggtttctaaaaccttcggttggtactatctgctggcggcaacgctctatattgtctttgtggtctgtatcgcttgtagccgttttggtagcgtgaagctcgggccagaacaatccaaaccggaattcagcctgctgagttgggcggcgatgctgtttgctgccgggatcggtatcgacctgatgttcttctccgtagccgaaccggtaacgcagtatatgcagccgccggaaggcgcgggacagacgattgaggccgcgcgtcaggcgatggtctggacgctgtttcactacggcttaaccggctggagcatgtatgcgctgatgggcatggcgctcggatactttagctatcgttataatttgccgctcaccatccgcagcgcgctgtacccgatcttcggtaaacggattaacgggccgataggtcacagtgtggatattgcagcggtgatcggcactatcttcggtattgccactacgctcggtatcggtgtggtgcagcttaactatggcttgagcgtactgtttgatattcccgatagcatggcggcgaaagcggcactgatcgccttgagcgtgataatcgccacgatctctgtcacctccggtgtcgataagggcattcgcgtgttaagcgagcttaatgtcgcgctggcgctgggattgatcctgttcgtattgtttatgggcgacactagcttcctgcttaatgcactggtgctgaatgttggcgactatgtgaatcgctttatgggcatgacgctcaacagttttgccttcgaccgtccggttgagtggatgaataactggacgctcttcttctgggcatggtgggtggcatggagcccgtttgtcggcttgttcctggcgcgtatcagccgtgggcgtaccattcgccagttcgtgctgggcacgttgattattccgtttaccttcacgctgttatggctcagcgtgttcggcaatagcgcgctgtatgaaatcatccacggcggcgcggcatttgccgaggaagcgatggtccatccggagcgcggcttctacagcctgctggcgcagtatccggcgtttacctttagcgcctccgtcgccaccattactggcctgctgttttatgtgaccagcgcggactccggggcgctggtgctggggaatttcaccagccagcttaaagatatcaacagcgacgcccccggctggctgcgcgtcttctggagcgtggcgattggcctgctgacgctcggcatgctgatgactaacgggatatccgcgctgcaaaacaccacggtgattatggggctgccgttcagctttgtgatcttcttcgtgatggcggggttgtataaatctctgaaggtagaagattaccgccgtgaaagtgccaaccgcgataccgcaccgcgaccgctggggcttcaggatcgcctgagctggaaaaaacgtctcagccgcctgatgaattatccgggcacgcgttacactaaacagatgatggagacggtctgttacccggcaatggaagaagtggcgcaggagttgcggttgcgcggcgcgtacgtggagctaaaaagcctgccaccggaagagggacagcagttgggtcatctggatttgttggtgcatatgggcgaagagcaaaactttgtctatcagatttggccgcagcaatatagcgtgccgggctttacctaccgcgcacgcagcggtaaaagcacctactaccggctggaaaccttcctgttagaaggcagccagggcaacgacctgatggactacagcaaagagcaggtgatcaccgatattcttgaccagtacgagcggcaccttaactttattcatctccatcgtgaagcgccgggccatagcgtgatgttcccggacgcgtgattgttattgcataaaaccgcgccatgtctgcatatggcgctgtttctcctacctcttgatacgttatatctatacggttaagcccttagtatctattgatgattaccagacaacagataataaaaaagaaaagaactattgcagcccaaaacctacatttgggctgttgcgaatgttcaataagtttagtcttatttaatgtaaatattgctgatcatttgaaatgacgcattattcatgagaaatgtgtatcgtaaatcaactgaaattaacgcaaccatttgttatttaaggtttaattatctgtgtgtgatattttattgaatgttttaaatattgtttttattggcattgctataatattggttatcatttgctgaatggattcagtcttaatgagtgggtttttaagggacaggcatagagtaatgatacgtatgcataaccaacatctttactcattatgtcattgaatgttgacgctatgtgtttatgagggagaggtattttcagttgatctggattgttaaattcatataatgcgcctttgctcatgaatggatgccagtatgtagtgggaaattataaatattgaaatagtccaactacttctttattaccaaaaatgagtatctgaattttaatattgcattcttgcgtgattatctcctgagtttgacttgtgattacctttttaaggtatttagcgtaactgtttttgagcgagcatcagaggtaaagataatcttcttgatagtgatgtgggatgttatacgtatggcatcgctgatgtttatggttaccccttatgtgtgctcaggaatcgacaggtaatcactcatactgaacagcgataaaagataaaggtgtgttcatgaatagttgtgattttcgtgtttttctgcaagagttcggtacaacggttcatttgagtttgcctggtagcgtatccgagaaagaacgactgctactcaagctgctgatgcagggaatgtctgtaacagaaataagtcagtacagaaatcgcagtgcaaagacaattagtcatcaaaagaaacagctctttgagaaactggggattcagagcgatattactttctggcgcgatattttctttcagtacaatccggagatcatatccgccacggggagtaatagtcacagatatattaatgataatcactatcaccatatcgtcacgcctgaagccatcagtctggcgttggaaaaccacgaattcaaaccgtggatccaaccggttttctgcgcgcagactggcgtactgacgggctgtgaggtgcttgtccgctgggaacatccacaaacgggaattatcccaccggatcagtttattcctctggcggagagttccggtcttattgtcataatgacccgccaactgatgaaacagactgcggatattctgatgccggtaaaacatttgctgccggacaatttccatattggcatcaacgtcagcgcgggttgttttttggcagcgggatttgaaaaagagtgtctgaacctggttaataaattaggtaacgataaaatcaagctggttctcgagctaacggaacgtaaccctattccggtaacgccagaagccagagcgatatttgacagccttcatcagcacaacattacctttgcgctggatgactttggtacgggttatgcgacctatcgttacttgcaggcgttcccggtcgattttattaagatcgataagagttttgtgcaaatggcgagtgtcgacgaaatctccggtcatattgtggacaatattgtcgaactagcgcgtaagcctggtctgagtatcgtggcggaaggggtagaaacccaggagcaggcggatttaatgatcggtaaaggcgttcactttttgcagggctatttgtactctccgccagtaccgggtaataaatttatctctgaatgggtaatgaaagcaggtggttgatgtaaaccgctattcacagcgcatcgggaggttggcagcgattaattctcccgatgcagtaaatcctgatagatccccgttaatatgccatttggcgcaaattgttttttaatccactgcgtcacctgacccgtagcagaatgctgagtcgccagtaacatgcggctatcctggcgcggattatggatttgtcgggtaaccagcagggattgcgtcatcgcctcacggaccatgtaatccggcaaaaaaccaattccttcacctaaaatctggcactgacatttggtgttgaaatctggcaccagaatactctcctgcccgtgcagcaaccagcccacttttttattaatcgtatgcgcggtgtcctccaccataatattagggtagagacgcagttggctttcggcgatgggttccggcacaaaggctaacgggtgatccggggcgatagcaaaagcccagcgaatcgcgccaatttcagtgtaatcaataccgccgccgtccagtagtgtatcgggtgcgccgatggcgatattggcctgattattaataatcgcatcccagacgccgttatacacttcggtggtgacggtaatctggcaggtaggaaactgctttttcagcacctgtaacaagcgtgcggtgtgtttgggcgtataaagcagctgattaatacaaatgcgcacacgcgcttctatgccctggctaatagtatcgattctgcgtttgatggcataaaaatcattcagcaggtcggtagctttgcggaaaaaataacgcccggactccgttaactcaatgctgcgggtactgcgagtgaacagcaccacatccagccccgtctccatacgcttaatggtgtagctaatggcggaagtggttaaacccaactcttctgcggctttactgaagctgccaaaacgcgcagcggtagtaaatgccaacagattctcttcggtaaaaatactgttcattaaaccattctcgccattatctactatgaatttctccagctatgactgtagaggtatcggttaaagatagataatcatttttgaataacttttaatacccgtcgcgtttagtcgtcgcttcgcttaatttttgtccaccatattcactaattacccccacgcagttacccgccagaaaacccagtaacgtcaccgtccagttcatcccgctggcaaaaaacagcgtcatgccgagaaagccaccgggaataaaggacagtaaccagaaacgcccttgccagaccactaccgcgctgaagggtacggtagtaattacgctcgcccagaacgcggacagtccacttacagaggccagccaaccagcagtcagcgcggcgaaaaacgcccacaccatcccggaataattaaccgccagacttctgataaacccgcttttaccgccgcctgcggcataaaaactgcaaaaggcgacgaagccaatggttcctaataattcccatccttgagagagcccgacatgactagacactaactgccaaagccctgcacaaataccgacggtgacacccgttgccgtgagtccgttcatcttgttcccctctggttagacatggacgaaagctactcttacatgtgcagactatagagaaataaaacctgattgagtgaaagggtatcgggtcaaagaaacaaatattgcactaccgcacactgcgaaaagattgttgaatattattcaacaaaaaggcgagatacggcgaattaaatttaagcgggttcttttatcagattatcgttgctattctcaattcatcgaaaacagccacaaaaaccaggggaatgtgaatgagtataaaaaatctacctgccgactatttattggctgcacaacagggtgatatcgataaagtaaaaacctgccttgcgctgggtgtcgatattaatacctgcgatcgtcaggggaaaacggcaattacgctggcaagtttatatcagcaatatgcttgcgttcaggcattaattgatgccggagcggatattaataagcaagattatacctgtttaaatccttttttaattagctgtctgaacgatgatttaacgctactacgaattattttaccggctaaacccgatcttaattgcgtaacccgttttggcggtgtcggcctgacgcctgcctgtgaaaaaggccatttaagtattgtaaaagagcttttggcgcatacggagattaacgttaaccagaccaaccatgtaggctggacgccgctactggaagcgattgtgcttaatgatggtggtattaaacagcaggcgattgtgcagttattgctggaacacggtgccagcccgcatctgaccgataaatatggcaaaacgccactggaactggcgcgggaacggggctttgaagagattgcgcagttactgattgccgcaggtgcataaaccgggaggcttgctatcaacacaccagaaagacggtgtgtgtgggcgctaactgcggatgcggattttctggcgcagcgggggcaaggacaggttgaacaggtctttgccagagcggtaaatatcgcactcccggctcgccagcagttgctgacgctgctttgtgaagagtacgacaatgcgccaaacagttgtcggttggcactcactcactttgatgatctgttccggcatggtgataaggttcagtttgacgatcaaggtattacggttggtcaacatcttcatatagagatgagtcgttgtcggcgttggctgtccccaaccttgcaaatgaccgctgtgaattttcaccttatcgcctggctacagtggcacgacattattcatcagcacctgggggaaaatgaaaccctgtttaattatcgcggcgataatccgttttatcaggcgttaaataaagaattacatattaaacgacgggcagttattcaggccgtaaacgataaacaaaatatcgccagtgcggtcgccagtatgatggggttagggattggccttacgccaagtgccgacgattatttaacaggtctggcgcttattttatttattcccgggcatccggcggaaaaatacaaagaggaattttatctcggtctgcaacgcggcaaaaataataccacattattaagtgccataacgctggaagccgcattacaacaacgctgccgggaaaatattcatcgttttattcacaacattatttatgacatccctgggaacgcaactcaggcaatagaaaaaattaaacatattggctccagttccggctgcgacatgctgtatggcatggccgatggttgtgcgctgagccaaacctacggagggaattatgtcagttaattaaccaaacctacggagggaattatgagtgttaaaatagtcattaaaccgaatacctattttgattctgtcagcctgatgtctatctccacgcgtgcaaataaactcgacggcgtcgagcaggcatttgtggcgatggcgaccgaaatgaataaaggcgtgctgaagaatttaggactgctgacgccggagctggagcaggcgaaaaacggcgacctgatgattgtcatcaatggtaaaagcggtgcggacaacgagcagttactggtggagattgaagaactgttcaacaccaaagcgcaaagcggcagccacgaggcgcgttacgccactattggcagcgccaaaaagcatatcccggaaagtaacctggcggtgattagcgtcaacggtctgtttgccgctcgcgaagcgcgtcaggcgctgcaaaacgatctcaacgtgatgctgttttccgataacgtcagtgttgaagatgaactggcgctcaagcaactggcccacgaaaaagggctgctgatgatggggccagactgtggcacggcgattatcaacggcgcggcgctctgttttggtaacgccgtgcgtcgcggcaacatcggtattgttggcgcatccggcaccggcagtcaggagttgagcgtccgcattcatgaatttggcggcggcgttagccaactgattggcaccggcgggcgcgacctgagcgagaaaatcggcggcctgatgatgctcgacgccatcgggatgctggaaaacgatccgcaaactgaaatcattgcgcttatctccaaaccgcctgcgcctgcggtggcccgcaaagtgctggaacgtgcgcgcgcctgccgcaagccggtggtcgtctgcttcctcgatcgtggcgaaacgccagtggatgagcaggggctacagtttgcccgcggcaccaaagaggcagcgctaaaagcggtgatgctctccggcgtgaaacaggaaaatctcgacctgcatacgcttaaccagccgttgattgcggatgtgcgtgcgcgtctgcaaccgcagcagaaatacattcgtggcctgttctgcggcggcacgctgtgcgacgaaaccatgttcgcggtgatggaaaaacatggcgatgtctacagcaacattcagcccgatccggaattccgcctgaaagatatcaaccgcagcatcaaacacaccttcctcgactttggcgatgacgacttcaccaatggcaagccgcacccgatgattgaccccaccaaccgcatcagtcgcttgatcgaagaggcgcgcgatccagaagtggcggtgatcgtgatggattttgtgctcggatttggaagccatgaagatccggtcggctccaccatcgagacgatcaaagaagcgaaagcgatcgccgctgccgaaggacgcgagttgatcattctcgcctatgtgctgggtaccgatcttgatacgccaagcttagaacaacaaagccagatgctgcttgatgccggagtgattctggcgagcagcagcaccaataccggattgctggcgcgtgaatttatctgcaaaggggaggaagcctgatgagccagagtctgtttagccaaccattgaacgttattaacgtcggcatcgccatgtttagcgatgacctgaaaaagcagcatgtagaagtgactcaactcgactggacgccgccggggcagggcaatatgcaggtggtgcaggcgctggataacattgccgatagcccgctggcggacaaaatcgccgccgctaaccagcaggcgctggagcgtattatccagagccatccggtgctgattggttttgatcaggcgattaacgtggtgccgggcatgacggcgaaaaccattcttcacgccgggccgccgatcacctgggaaaaaatgtgcggcgcgatgaaaggcgcggtcaccggagcgctggtgttcgaaggactggcgaaagatctcgacgaggcggctgaactggcggcttccggggagatcaccttcagcccgtgtcacgagcacgactgcgtgggaagcatggcgggtgttaccagcgccagcatgtttatgcacatcgtaaaaaacaaaacctacggcaacatcgcttataccaacatgagcgagcagatggcgaagattttgcgtatgggcgctaacgaccagagcgtgattgaccgcctgaactggatgcgtgatgtgcagggaccaatactgcgcgacgcgatgaaaattatcggcgaaatcgatctgcgcttaatgctggcgcaggcgctgcatatgggcgatgagtgccataaccgcaataacgccgggacgacactgctgattcaggcgctgacgccggggattattcaggcgggttattccgtcgagcaacagcgcgaagtgtttgagtttgtcgccagcagcgactacttctccggcccgacgtggatggcgatgtgtaaagcggcgatggatgcggcgcatggcatcgaatacagcaccgtggtcaccaccatggcgcgtaacggcgtcgagttcggcctgcgggtcagcggcctgccggggcaatggtttaccggcccggcgcagcaggtgatcggcccgatgtttgccggttataagccggaagatagcgggctggatatcggcgacagcgccatcaccgaaacctacggtattggcggatttgctatggcgaccgcgcccgctatcgtcgcgctggtgggcggcacggtggaagaagctattgatttctcccgtcagatgcgcgaaatcaccctcggtgaaaaccccaacgtcaccattccgctgctcggttttatgggcgtgccgagcgcaatcgacatcacccgcgtgggtagcagcggcattctgccggtgatcaacaccgccatcgcccataaagatgcgggcgtcggcatgattggcgcgggcattgtgcatccaccttttgcctgcttcgagaaagccattcttggctggtgcgaacgttacggcgtctgacctacatgttcatgccggatgcggcgtgaacgccttatccggcctacgaatggcgcaagaatctgtaggcctgataagcgtagcgcatcaggcatttgtcaccattgccggatgcggcgtgaacgccttatccggcctacgaatggcgcaagaatctgtaggcctgataagcgtagcgcatcaggcatttgccaccactgccggatgcggcgtggacgccttatccggcctacgagtggcgcgagaatctgtaggcctgataagcgtagcgcatcaggcatttgtcaccattgccggatgcggcgtgaacgccttatccggcctacgagtggcgcgagaattgtaagcctgataagcgtagcgcatcaggcagtctggcgttggtcataaccccatcaccctctgtagcggacataacaacatgaaagagcttgtggtcgttgccattggtggcaacagcattatcaaagataacgccagccagagcattgagcatcaggcggaggcggtgaaagccgtcgccgatacggtgctggaaatgctggcttccgattacgacattgtgctgacccacggcaacgggccgcaggtcgggctggatttacgccgtgcggagattgcccacaagcgcgaagggctgcccttaacgccgctggcgaactgtgtggcagatacgcagggcggcatcggctatctgatccaacaggcgctgaataaccggctggcgcgtcacggcgagaagaaagccgtcaccgtggtgactcaggtggaagtggataaaaacgatccaggttttgcccatcccaccaagcccatcggcgcattctttagtgacagccagcgtgacgaattacaaaaggcaaaccctgactggtgttttgttgaagatgccgggcggggctatcgccgcgtggtcgccagcccggaaccgaaacgtattgtcgaagcacctgccattaaagcgctgatccaacaaggttttgtcgtaattggcgcgggcggcggtggaattccggtagtgcgtactgacgcgggagattaccaaagcgtggacgcggttatcgacaaagatctctctaccgcgctgctggcccgtgaaattcacgccgacattcttgtgatcaccactggcgtcgaaaaagtgtgtattcactttggcaaaccgcagcagcaggcgctcgatcgggtggatattgccaccatgacccgctatatgcaggaagggcatttcccgcccggcagcatgttgccaaaaatcatcgccagcctgacatttttagaacaaggcggcaaagaagtgattatcaccacgccggaatgcctgcctgcggcgctgcgcggcgaaacgggcactcatattattaaaacgtaaggacgtaagatgaaagaaagcaatagccgccgtgaatttctgagccagagcggtaagatggtcaccgccgccgcgctgtttggtacctctgtgccgctcgcccatgcggcggtagctggcaccctaaactgcgaagcgaacaacaccatgaaaatcactgacccgcattactatctcgataacgtgctgctggaaaccggttttgactacgaaaatggcgtggcggtgcagacccgcacggcgcgccagaccgtggagattcaggacggcaaaattgtcgccctgcgcgagaacaagctgcatccggacgccacgctgccgcactatgacgctggcggtaagctgatgctgcccaccacccgcgacatgcatattcatctcgacaaaaccttttacggcgggccgtggcgcagcctcaatcgtccggcaggcaccaccatccaggacatgatcaaactcgagcagaaaatgctgccggaactgcaaccgtacactcaggagcgggcagaaaaactgattgatttattgcagagcaaaggcaccaccattgcccgcagccactgcaatatcgaaccggtttccggcctgaaaaatctgcaaaatttgcaggcggtgctggcgcgacgtcaggcgggctttgagtgtgaaatcgtcgccttcccgcagcacggtttgctgctgagcaaatctgaacctttaatgcgtgaagcgatgcaggcgggggcgcattacgtcggcggcctggacccgaccagtgttgatggcgcgatggaaaaatccctcgacaccatgttccagattgcgctggactacgacaaaggcgtcgatattcacctgcacgaaaccactccggcaggcgtggcagccatcaattatatggttgaaacggtagagaaaacgccacagctgaagggcaagctgaccatcagtcacgcctttgcgctggcaacgctcaacgagcaacaggtagatgaactggcgaaccggatggtggtgcaacaaatttctatcgccagcacggtgccgattggcacgctgcatatgccgctcaaacagttgcacgacaaaggcgtaaaagtgatgactggcactgacagcgttatcgaccactggagcccttatggtctgggcgacatgctggaaaaagccaatctgtacgcgcagctctatattcgtcctaacgaacagaacctctcccgcagcctgtttttagccactggcgatgtattgccgctgaatgaaaaaggcgagcgtgtatggccaaaagcgcaggatgacgccagctttgtgctggtggacgcctcctgttccgccgaggcggtggcgcgtatcagcccgagaaccgcaacgttccataaagggcaactggtgtgggggagtgtggcaggttgatgcgcatttgaaacgcctgcaacggtgaatagtaagagatttaagccccagggagtggggcaatctgaatatgagtgtgtcggcagaaatggacattatctttgaggaatatgcccttattgacgttgtgtagataactatttgtctacgtgaaaagatcatcagttttgccgattttagtcttttacagatagcaaatatcacacttacaggcgctcgccttatggggaacgttgctgctctgtttcattcaggctcgcggcatgttggggctggatcgggtggtttaaatattggctatattcaatggacgcgttttgccgcgatgacatatcaggcgttgccaaatacacatagctaatcaggagtaaacacaatgaagatcaaagctgttggtgcatattccgctaaacaaccacttgaaccgatggatatcacccggcgtgaaccgggaccgaatgatgtcaaaatcgaaatcgcttactgtggcgtttgccattccgatctccaccaggtccgttccgagtgggcggggacggtttacccctgcgtgccgggtcatgaaattgtggggcgtgtggtagccgttggtgatcaggtagaaaaatatgcgccgggcgatctggtcggtgtcggctgcattgtcgacagttgtaaacattgcgaagagtgtgaagacgggttggaaaactactgtgatcacatgaccggcacctataacagcccgacgccggacgaaccgggccatactctgggcggctacagtcaacagatcgtcgttcatgagcgatatgttctgcgtattcgtcacccgcaagagcagctggcggcggtggctcctttgttgtgtgcagggatcaccacgtatagcccgctacgtcactggcaggccgggccgggtaaaaaagtgggcgtggtcggcatcggcggtctgggacatatggggattaagctggcccacgcgatgggggcacatgtggtggcatttaccacttctgaggcaaaacgcgaagcggcaaaagccctgggggccgatgaagttgttaacagtcgcaatgccgatgagatggcggctcatctgaagagtttcgatttcattttgaatacagtagctgcgccacataatctcgacgattttaccaccttgctgaagcgtgatggcaccatgacgctggttggtgcgcctgcgacaccgcataaaagcccggaagttttcaacctgatcatgaaacgccgtgcgatagccggttctatgattggcggcattccagaaactcaggagatgctcgatttttgcgccgaacatggcatcgtggctgatatagagatgattcgggccgatcaaattaatgaagcctatgagcgaatgctgcgcggtgatgtgaaatatcgttttgttatcgataatcgcacactaacagactgaaaaaattaataaataccctgtggtttaacatattaacttcgctctccacttaactttttagttaaggagagcgaaataatatcaaagtagcagtaaaacctataacgtaaatttaaattgttaaattaacgccctccagtacacaatacttcacacgttagttatgagcgatttctgatagtgcctggtttaatcagagctttattatctgcgacgtttatttttatttaagagagatcgcgatgataagtttaaaagctccgcacaataatttgatgccatatacgcaacaaagcatacttaatacggttaaaaacaatcagttaccagaggatatcaaaagctccctggtttcctgtgtcgatatattcaaggttttgattaaacaatattatgattatccttatgattgtcgtgatgatttagtcgatgacgacaaactcattcatctcatggctgccgtacgagactgtgagtggagtgacgataacgcactcaccataaatgtgcagtttaatgatttccctggattttatgactggatggattaccctgatcacccggttaagtttgtttttcacatacttgaaaatcaaaaagggacagtttgggtatatgaccaggatgatgcgtttcttgatattaaagcaaacgtgcaggctggacgctttaccgggcttaagaaattagtgcagtttatcgatagtgtgcgaacagattgcaaatgtattcttcttgaataccatatgcctttgctgagaattttccctaaagggaaagagtgtatgcatgtggaaaaatggcttcgcgaaatgagctctattccggagacagacgcgcccattaagcaggcgcttgcgcatggattattattacacttaaaaaatatctaccctgtttttcctgaaagtctggtgatgttattgctctctgttctggacgtaaaaacatacagagatgatgcgcgattaaatgaatggatatctaatagagtgcaggaattaggtgacagatattatcctgtaaataagcacgttaaaatccgctacactctttaattcagaaagggttccacctgcaagttgttattccacctgagagtgaatcgcaatgcaggtaatcatttcatctgtatatctgtatgccaactggcattccatctcttttttcgccgatattttgttgtgatcggcgacacttcgcttaaaaaagcaccagtagtggtttcgcagccatgcggtgtataaaaaatgatctcatgcagatgttttgtgaatgtgttggttgacattcatatgaaaaaaatcataattccatcatgtttgtgtggggtcttttctgtatcttacgcatcgcactcaagcctgacagaaaatatgctgtaaggctcatatcaaaaaccgccattagctcatcaggaagagcagacgacaaccaggattgttgtatggtacggggttcgaggcctcgatggcggtccaacttttcaaaactcttctgaatcagatccccttattaagttccctgcaaagtggaacattgccattgtttggctatagtggatggggcagaccaatgaaaaaagcccacacaggggagagtgggctgaaatgggaagctaaagacagtagtaaacttatcggaaataaggaccacgcattacgggggctaagtagcccgatggccgtgattcggcaaatcaggttgattacgtaaagagtaaattatctgctcaccgctgcgtcaccccttcgtaaatcaggcgtagcgcgaatacaccaataattgcaccaataacccgactggcaacgcgttgcatacgcccataagcacgacgcacagcgggcaaagaaaacgcctgactaagaaaaactcgccagataatacttgcgagcacaatccccgcccaggccattaaacgtgcccatgttggtgtttctgcatttaatgttacactgaaaatactgataaaaaataaaacggtttgcgggttagagagatcggtaattaatccgcggcgaaaaaagacataccagggggcgctaatcggttgttgtagtgtgctcatttgcggtgtactctggcggcgcatgctgcaccacgcaaaccataagagataagcgccgccgacgattctgataaggctaaaaatctcctcacactgcgtaattagcgttgcaagaccaaacaaacccaacccggaataaaatgcatcgcccagcgccacgcccagcccggtcagcacccctgcgcgtcgaccggaagccaggctggtttgtactaccacaaagagattggctcccggattaaaaaaagtaatcacgaacagtcctacggtcaggtaaacggcatgcaaaggatccatagtgatttcatccataaataagtgaactaactgcatcatatttctaccaaaaataatcgggtgcgagagagatcacaaagtgtcttatttccggttactggcgtttatgccctgactgaactaattattaatcaacccaataatgtgggtgggtgatagtgtgataacaactctggagccgtaatatgaaaataatctctaaaatgttagtcggtgcgttagcgttagccgttaccaatgtctatgccgctgaattgatgaccaaagcggaatttgaaaaagttgaaagccagtatgaaaaaataggtgatattagtaccagcaatgaaatgagcactgcagatgcaaaagaagatttgatcaaaaaagcggatgaaaaaggggctgatgtgttggtactgacctccggtcaaactgacaataagatccacggcacggcaaatatttataagaagaagtaattctgaatcctatgtaaacatctccgatgcgtaagtttatcggtgatcatctattgaaatttatgccggataaagcgttcgcgctgcattcggcagttcagcttttcagccgccgccagaacgtcgtccggctgatgcctaaataattcgccgctgctgttttatcgccattaaatttctccagtgcctgttgtggtgtcagtaagcgtggagcgggagttttcgcgctctcgcgcgccagttccggcagtagcagttgcataaactgcggcgttaaatccggcgtcggttccacacttaaaaacagcgccagtcgttccatcatattgcgcagttcacgaatattgcctggccagtcgtagtgcagcagcacagtttcacttgcctgtaacccctggcgtaatgcagcagaaaatggggcggagagcgccgccagagacactttcaaaaagctttccgccagcggaagaatatccgccacccgctcgcgcagtggtggcaattgcagacgcaaaatactcagccgataaaacagatcacggcgaaaacgtccttgctgcatatcttcttccagattgcagtgagtggcgctaatgacccgtacatctaccggaacaggctgatgcccgccgacgcgggtgacctctttttcttccagcacccgcagcagccgggtctgcaaaggtagcggcatttcgccaatctcatccagaaacagcgtaccgccgtgggcaatttcgaacagcccggcgcgacctccgcgtcggctgccggtaaacgccccttcctcatagccaaacagttctgcttccagcaggctttcggcaatcgccccgcagttgacggcaacaaacggatggctctttttgccctgtcgcgcatcgtggcgggcaaaatattcccgatgaatcgcctgggccgccagctctttgcccgtccccgtttccccctcaatcaacaccgccgcactggagcgggcatacagcaaaatagtctgccgtacttgttccatctgtggactttgaccgagcatatcgcccagcacgtaacgagtacgcagggcgttgcgggtggcatcgtgagtgttatggcgtaagctcatgcgcgtcatatccagcgcatcgctgaacgcctggcgcacggtggcggcggaatagataaaaattccggtcattccggcttcttctgccaaatcggtaatcagccctgcgccgaccaccgcttcggtgccgttagcttttagctcgttaatctgcccgcgtgcgtcttcctcggtaatgtagctacgttggtcgaggcgcaaattaaaggttttttgaaacgccaccagcgctggaatggtttcctgataggtgacaacgccgatagaagaggtgagttttccggcttttgccagtgcctgtaacacatcgtagccgctcggtttaatcaaaataactggcacactcaggcggcttttcaggtacgcgccgttagagccagccgcgatgatggcgtcacagcgttcgtttgccagtttcttgcggatgtaggtcactgctttttcaaagccaagctgaataggggtaatgttcgccaggtgatcaaactcgaggctgatatcgcgaaacagctcgaacaggcgcgttacagataccgtccagataaccggtttgtcgtcattaagccgtggtggatgtgccatagcgcaccgcaaagttaagaaaccgaatattgggtttagtcttgtttcataattgttgcaatgaaacgcggtgaaacattgcctgaaacgttaactgaaacgcatatttgcggattagttcatgactttatctctaacaaattgaaattaaacatttaattttattaaggcaattgtggcacaccccttgctttgtctttatcaacgcaaataacaagttgataacaaaggatgggctatgtctctacactctccaggtaaagcgtttcgcgctgcactgactaaagaaaatccattgcagattgttggcaccatcaacgctaatcatgcgctgttggcgcagcgtgccggatatcaggcaatttatctttctggcggtggcgtggcggcaggtagcctggggctgcccgatctcggtatttctacccttgatgatgtgctgaccgacattcgccgtatcaccgacgtttgtagcctgccgctgctggtggatgcggatatcggttttggttctagcgcctttaacgtggcgcgcaccgtgaaaagcatgattaaagccggtgcggcaggattgcatattgaagatcaggttggtgcgaaacgctgcggtcatcgtccgaataaagcgatcgtcagcaaagaagagatggtggatcggatccgcgcggcggtggatgcgaaaaccgatcctgattttgtgatcatggcgcgcaccgatgctctggcggtagaggggctggatgcggcgatcgagcgtgcgcaggcctatgttgaagcgggtgccgagatgttgttcccggaggcgattaccgaactcgccatgtaccgccagtttgccgatgcggtgcaggtgccgatcctcgccaacatcaccgaatttggtgccacgccgctgtttaccaccgacgaattacgcagcgcccatgtcgcaatggcgctgtacccacttagtgcgttccgcgccatgaaccgcgccgctgaacatgtctacaacgtcctgcgccaggaaggcacgcagaaaagcgtcatcgacaccatgcagacccgcaacgagctgtacgaaagcatcaactactaccagtacgaagagaagctcgacaacctgtttgcccgtagccaggtgaaataaaaaacgcccgttgattgtattcgacagccgatgcctgatgcgtcgctgacgcgacttatcaggcctacgaggtgcactgaactgtaggtcggataagacggatggcgtcgcatccgacaaccgatgcctgatgcgccgctgacgtgacttatcaggcctacggggtgcactgaactgtaggtcggataagacgcatagcgtcgcatccgacaaccgatgcctgatgcgccgctgacgcgacttatcaggcctacggggtgcactgaactgtaggtcggataagacgcatagcgtcgcatccgacaaccgatgcctgatgcgccgctgacgcgacttatcaggcctacggggtgaactgaactgtaggtcggataagacgcatagcgtcgcatccgacaacaatctcgaccctacaaatgataacaatgacgaggacaacatgagcgacacaacgatcctgcaaaacagtacccatgtcattaaaccgaaaaaatctgtggcactttctggcgttccggcgggcaatacggcgctctgcaccgtgggtaaaagtggcaatgacctgcattaccgcggctacgatattcttgatctggcgaaacattgcgaatttgaagaagtggcgcatctgctgatccacggcaaactgccgacccgtgacgaactcgccgcttacaaaacgaaactgaaagccctgcgcggtttaccggctaacgtgcgtaccgtgctggaagccttaccggcggcgagccacccgatggatgttatgcgcaccggtgtttccgcgctcggctgcacgctgccagaaaaagaggggcataccgtctctggcgcgcgggatattgccgacaaactgctggcgagccttagcagcattctcctttattggtatcactacagccacaacggcgaacgcatccaaccggaaaccgatgacgactccatcggcggtcacttcctgcatctgctgcacggcgaaaagccaagccaaagctgggaaaaggcgatgcatatcagcctggtgctgtacgccgaacacgagtttaacgcctccacctttaccagtcgggtgattgcgggcaccggctctgatatgtattccgcgattattggcgcgattggcgcactgcgcgggccaaaacacggcggggcgaatgaagtgagcctggagatccagcaacgctacgaaacgccggacgaagccgaagcagatatccgcaagcgcgtggaaaacaaagaagtggtcattggttttggtcatccggtttacaccatcgctgacccgcgccaccaggtgattaaacgtgtggcgaagcagctcagccaggaaggcggcagcctgaagatgtacaacatcgccgatcgcctggaaacggtgatgtgggagagcaaaaagatgttccccaatctcgactggttctctgctgtttcctacaacatgatgggcgttcccaccgagatgttcacaccactgtttgttatcgcccgcgtcaccggctgggcggcgcacattatcgaacaacgtcaggacaacaaaattatccgtccttccgccaattatgttggaccggaagaccgcccgtttgtcgcgctggataagcgccagtaaacctctacgaataacaataaggaaacgtacccaatgagtgctcaaatcaacaacatccgcccggaatttgatcgtgaaatcgttgatatcgtcgattacgtcatgaactacgaaatcagctctaaagtggcctacgacaccgcacattactgcctgctcgacacgctcggctgcggtctggaagctctcgaatacccggcctgtaaaaaactgctggggccaattgttcccggcaccgtcgtacccaacggcgtgcgcgtccccggaactcagttccagctcgaccccgtccaggcggcatttaacatcggcgcgatgatccgctggctcgatttcaacgatacctggctggcggcggagtggggccatccttccgacaacctcggcggcattctggcaacggcggactggcttagccgcaacgcggtcgccagcggcaaagcgccgttgaccatgaaacaggtgctgaccgcaatgatcaaagcccatgaaattcagggctgcatcgcgctggaaaactcctttaaccgcgtcggcctcgaccacgttctgttagtgaaagtggcttccaccgccgtggtcgccgaaatgctcggcctgacccgcgaggaaattctcaacgccgttagcctggcgtgggtggacggtcagagcctgcgcacctatcgccatgcgccgaacaccggcacgcgtaaatcctgggcggcgggcgatgccacttcccgcgcggtacgtctggcactgatggcgaaaacgggcgaaatgggttacccgagtgccctgactgcgccggtgtggggcttctacgacgtctcctttaaaggtgaaagcttccgcttccagcgcccgtacggttcctacgttatggaaaatgtgctgttcaaaatctccttcccggcggagttccactcccagacggcagttgaagcagcgatgacgctctatgaacagatgcaggcagcaggcaaaacggcggcggatatcgaaaaagtgaccattcgcacccacgaagcctgtattcgcatcatcgacaaaaaagggccgctcaataacccggcagaccgcgatcactgcattcagtacatggtggcgatcccgctgctattcgggcgcttaacggcggcagattacgaggacaacgttgcgcaagataaacgcattgacgccctgcgcgagaagatcaattgctttgaagatccggcatttaccgctgactaccacgacccggaaaaacgcgccatcgccaatgccattacccttgagttcaccgacggcacacgatttgaagaagtggtggtggagtaccccattggtcatgctcgccgccgtcaggatggtattccgaaactggtcgataaattcaaaatcaatctcgcgcgccagttcccgactcgccaacagcagcgcattctggaggtttctctcgacagagctcgcctggaacagatgccggtcaatgagtatctcgacctgtacgtcatttaagtaaacggcggtaaggcgtaagttcaacaggagagcattatgtcttttagcgaattttatcagcgtagcattaacgaaccggagcagttctgggccgagcaggcccggcgtattgactggcagacgccctttacgcaaacgctcgatcacagcaatccgccgtttgcccgttggttttgtgaaggccgaaccaacttgtgccacaacgccatcgaccgctggctggagaaacagccagaggcgctggcgctgattgccgtctctagcgaaacagaagaagagcgcacctttacctttcgtcagctgcatgacgaagtgaacgcggtggccagtatgttgcgtagtttgggtgtgcagcgcggcgatcgggtgctggtgtatatgccgatgattgccgaagcgcatattactctgctggcctgcgcgcgcattggcgctattcacagcgtggtgtttggtggatttgccagccacagcgtggcggcgcgaattgatgacgctaaaccggtgctgattgtcagcgctgatgccggagcgcgcggtggcaaaatcattccctataaaaaattgctcgacgatgcgataagtcaggcgcagcaccagccacgccatgttttgctggtggatcgcgggctggcgaaaatggcgcgcgtcagcgggcgggatgtcgatttcgcgagcttgcgccatcaacacatcggcgcgcgggtaccggtggcgtggctggaatccaacgaaacctcctgcattctctacacttccggcacgaccggcaaacctaaaggcgtgcagcgtgacgtcggcggatatgcggtggcgctggcgaccagcatggacaccatttttggcggcaaagcgggcagcgtgttcttttgcgcaagcgatatcggctgggtggtggggcatagctatatcgtttacgcgccgctgctggcggggatggcgactatcgtttacgaaggattgccgacctggccggactgcggcgtgtggtggacaatcgtcgagaaatatcaggttagccggatgttcagtgcgccgaccgccattcgcgtgctgaaaaaattccctaccgctgaaattcgcaaacacgatctcagcagcctggaagtgctctatctggctggagaaccgctggacgagccgaccgccagttgggtgagcaatacgctggatgtgccggtcatcgacaactactggcagaccgaatccggctggccgattatggcgattgctcgcggtctggacgacaggccgacgcgtctgggaagccccggtgtgccgatgtatggctataacgtgcagttgcttaatgaagtcaccggcgaaccgtgtggcgtcaacgagaaagggatgctggtggtggaagggccgctgccgccggggtgtattcagaccatctggggcgacgacggccgctttgtgaagacttactggagcctgttttcccgcccggtgtacgccacctttgactggggcatccgtgacgctgacggttatcactttattctcgggcgcactgacgatgtaattaacgttgccgggcatcggctggggacgcgcgagattgaagagagtatctccagccatccgggcgttgccgaagtggcggtggttggggtgaaagatgcgctgaaagggcaggtggcggtggcgtttgtcattccgaaagagagcgacagtctggaagatcgtgatgtggcgcacagccaagagaaggcgattatggcgctggtggacagccagattggcaactttggccgcccggcgcacgtctggtttgtcagccaattgccaaaaacgcgatccggaaaaatgctgcgccgcacgatccaggcgatttgcgaaggacgcgatcctggagatctgacgaccattgatgatcctgcgagcttggatcagatccgccaggcgatggaagagtaagttattgtcggatgcgtcgcgcggtgcatccggcactgtgtgccgatgcctgatgcgacgctgacgcgttttatcatgcctacggacctgaaccgtaggtcggataaggcgctcgcgtcgcatccgacaccatgctcagatgcctgatgcgacgctgacgcgtcttatcaggcctacccactgtttttacaccgataatttttcccccacctttttgcactcattcatataaaaaatatatttccccacgaaaacgattgctttttatcttcagatgaatagaatgcggcggattttttgggtttcaaacagcaaaaagggggaatttcgtgagccaagataacaactttagccaggggccagtcccgcagagcgcgcggaaaggggtattggcattgacgttcgtcatgctgggattaaccttcttttccgccagtatgtggaccggcggcactctcggaaccggtcttagctatcatgatttcttcctcgcagttctcatcggtaatcttctcctcggtatttacactagttttctcggttacattggcgcaaaaaccggcctgaccactcatcttcttgctcgcttcagctttggtgttaaaggcagttggctgcctagtctgctactgggcggaactcaggttggctggtttggcgtcggtgtggcgatgtttgccattccggtgggtaaggcaaccgggctggatattaatttgctgattgccgtttccggtttactgatgaccgtcaccgtcttttttggcattagcgcgctgacggttcttagcgtgattgcggttccggctatcgcctgcctgggcggttattccgtgtggctggctgttaacggcatgggcggcctggacgcattaaaagcggtcgttcccgcacaaccgttagatttcaatgtcgcgctggcgctggttgtggggagttttatcagtgcgggtacgctcaccgctgactttgtccggtttggtcgcaatgccaaactggcggtgctggtggcgatggtggcctttttcctcggcaacagcttgatgtttattttcggtgcagcgggcgctgcggcactgggcatggcggatatctctgatgtgatgattgctcagggcctgctgctgcctgcgattgtggtgctggggctgaatatctggaccaccaacgataacgcactctatgcgagcggtttaggtttcgccaacattaccgggatgagcagcaaaacccttagcgtaatcaacggtattatcggtacggtctgcgcattatggctgtataacaattttgtcggctggttgaccttccttagcgcagctattcctccagtgggtggcgtgatcatcgccgactatctgatgaaccgtcgccgctatgagcactttgcgaccacgcgtatgatgagtgtcaattgggtggcgattctggcggtcgccttggggattgctgcaggccactggttaccgggaattgttccggtcaacgcggtattaggtggcgcgctgagctatctgatccttaacccgattttgaatcgtaaaacgacagcagcaatgacgcatgtggaggctaacagtgtcgaataactaagacgcatgtggaggctaacagtgagcaataacgctttacaaacaattattaacgcccggttaccaggcgaagaggggctgtggcagattcatctgcaggacggaaaaatcagcgccattgatgcgcaatccggcgtgatgcccataactgaaaacagcctggatgccgaacaaggtttagttataccgccgtttgtggagccacatattcacctggacaccacgcaaaccgccggacaaccgaactggaatcagtccggcacgctgtttgaaggcattgaacgctgggccgagcgcaaagcgttattaacccatgacgatgtgaaacaacgcgcatggcaaacgctgaaatggcagattgccaacggcattcagcatgtgcgtacccatgtcgatgttagcgatgcaacgctaactgcgctgaaagcaatgctggaagtgaagcaggaagtcgcgccgtggattgatctgcaaatcgtcgccttccctcaggaagggattttgagctatcccaacggtgaagcgttgctggaagaggcgttacgcttaggggcagatgtagtgggggcgattccgcattttgaatttacccgtgaatacggcgtggagagcctgcataaaaccttcgccctggcgcaaaaatacgaccgtctcatcgacgttcactgtgatgagatcgatgacgagcagagccgctttgtcgaaaccgttgctgccctggcgcaccatgaaggcatgggcgcgcgagtcaccgccagccacaccacggcaatgcactcctataacggggcgtataccagtcgcctgttccgcttgctgaaaatgtccggtattaactttgtcgccaacccgctggtcaatattcatctgcaaggacgtttcgatacgtatccaaaacgtcgcggcatcacgcgcgttaaagagatgctggagtccggcattaacgtctgctttggtcacgatgatgtcttcgatccgtggtatccgctgggaacggcgaatatgctgcaagtgctgcatatggggctgcatgtttgccagttgatgggctacgggcagattaacgatggcctgaatttaatcacccaccacagcgcaaggacgttgaatttgcaggattacggcattgccgccggaaacagcgccaacctgattatcctgccggctgaaaatgggtttgatgcgctgcgccgtcaggttccggtacgttatagcgtacgtggcggcaaggtgattgccagcacacaaccggcacaaaccaccgtatatctggagcagccagaagccatcgattacaaacgttgaacgactgggttacagcgagcttagtttatgccggatgcggcgtgaacgccttatccggcctacgtagagcactgaactcgtaggcctgataagcgtagcgcatcaggcaattccagccgctgatctgtgtcagcggctaccgtgattcattcccgccaacaaccgcgcattcctccaacgccatgtgcaaaaatgccttcgcagcggctgtctgccagctgtagtttatgccggatgcggcgtgaacgccttatccggcctacgtagagcactgaactcgtaggcctgataagcgtagcgcatcaggcaattccagccgcagacctgtgtcagcggttaccgactttcatttccgccaacaaccgcgcatttatccaacgccatgtgcaaaaatgccttcgcggcggctgtctgccagctatttttccgccgcaacaaaaccgccgttctctccagtagtggcggggcaagagaaatagctttaagcccgtcatgttgtgtggcaatcgctgctggtaacaatgtggaaagggaagtgcggcgaatcagctccagaaccgcgctaatactgttcgcctcaatgaccacctgtggatgtagccccgctttctcgcagtagtggtcaatttgctctctggtggcaaattccgcgctgagcaggaccagtttttcatcatgcaagcgactcaacgccacctgttcatggacggccagcggatgatgttgcgccacgactaacgctaaactttctgtcagtaaaggaattgcctccagctccgggctatgcacaggcgcgaaggcaatcccaacgtccaactcgtcgcggcaaagcatatcctcgattttctcctggctcatttcctgtagctggagcgtgatgctgggatagcgcgcatagaaatccgccattaaggggccgataaagtagctcgtaaaggtgggggtgacggcgatacgcaggcttcctcgcgtcagatcggcaacatcatgaatcgcccgtttacccgcccccagttcctgtaacgcccggctggcgtactgtcgccagacttctcctgcatcagtgagacgaatcgttcgcccgctacggtcaaacagcggcacgcctaaactctcctctaactggcgaatctgctgggaaagcgcaggttgggagacgtgcaacgcactggcggcacgggtgaagctgccatgttcagccacggcaagaaaataattgatatgtcgagagagcattcgcaacctataagtaaatccaatggaactcatcataaatgagacttttaccttatgacaatcggcgagtagtctgcctctcattccagagacagacagaggttaacggtgaaagagattattgatggattccttaaattccagcgcgaggcatttccgaagcgggaagccttgtttaaacagctggcgacacagcaaagcccgcgcacactttttatctcctgctccgacagccgtctggtccctgagctggtgacgcaacgtgagcctggcgatctgttcgttattcgcaacgcgggcaatatcgtcccttcctacgggccggaacccggtggcgtttctgctagcgtggagtatgccgtcgctgcgcttcgggtatctgacattgtgatttgtggtcattccaactgtggcgcgatgaccgccattgccagctgtcagtgcatggaccatatgcctgccgtctcccactggctgcgttatgccgatagtgcccgcgtcgttaatgaggcgcgcccgcattccgatttaccgagtaaagctgcggcgatggtacgtgaaaacgtcattgctcagttggctaatttgcaaactcatccaagcgtgcgcctggcgctcgaagaggggcggatcgccctgcacggctgggtctacgacattgaaagcggcagcatcgcagcttttgacggcgcaacccgccagtttgtgccactggccgctaatcctcgcgtttgtgccataccgctacgccaaccgaccgcagcgtaaccttatttttaaaccatcaggagttccaccatgattcagagtcaaattaaccgcaatattcgtcttgatcttgccgatgccattttgctcagcaaagctaaaaaagatctcagttttgccgagattgccgacggcaccggtctggcagaagcctttgtaaccgcggctttgctgggtcagcaggcgcttcctgccgacgccgcccgcctggtcggggcgaagctggatctcgacgaagactccattctactgttgcagatgattccactgcgtggctgcattgatgaccgtattccaactgacccaacgatgtatcgtttctatgaaatgttgcaggtgtacggtacaaccctgaaagcgttggttcatgagaaatttggcgatggcattattagcgcgattaacttcaaactcgacgttaagaaagtggcggacccggaaggtggcgaacgtgcggtcatcaccttagatggtaaacatctgccgaccaaaccgttctgacagccatgcgcaaccatcaaaagacgttcacgatgctgctggtactggtgctgattggtcttaatatgcgaccactgctcacctccgtcgggccactgctaccgcaattgcgccaggcgagcggaatgagctttagcgtggctgccctgttgaccgctctgccggtggttaccatgggcgggctggcgctggccggaagctggcttcatcagcatgtcagcgaacgtcgcagtgtcgccatcagtctgttgctgattgccgtcggtgcattgatgcgtgagctttacccgcaaagtgcgctgctgcttagcagcgcactgcttggtggggtggggatcggcatcattcaggcggtgatgcctagcgtgattaaacggcggtttcagcagcgcacgccactggtgatggggctgtggtccgcggctctgatgggcggcggtgggcttggtgccgccataacgccctggttagttcaacatagcgaaacctggtatcaaacactcgcctggtgggcgctgcctgccgttgttgcgctctttgcctggtggtggcaaagcgcccgcgaggtcgcctcttcccacaagacaacaaccactccggttcgcgtggtattcactccccgcgcgtggacgctgggtgtttacttcggtctgattaacggcggttacgccagcctgattgcctggttacccgctttctatattgagattggtgccagcgcgcagtacagcggttccttactggcattgatgacgcttgggcaagccgcaggagctttgctgatgcctgctatggctcgccatcaggatcggcgcaaactgttaatgctggcgctggtgttacaactggtggggttctgcggctttatctggctgccgatgcaattgccggtattgtgggcgatggtgtgtgggttaggtctgggcggcgcgtttccgctctgtttgctgctggcgctcgatcactctgtgcaaccggctattgctggcaagctggtggcgtttatgcagggaatcggttttatcatcgccgggcttgccccgtggttttctggcgtgctgcgtagtatcagcggcaattacctgatggactgggcatttcatgcgctgtgcgtcgttgggctgatgatcataaccctgcgttttgcaccagtacgttttccgcagctgtgggtcaaagaggcatgatgcgacgcttgttcctgcgctttgttcatgccggatgcggctaatgtagatcgctgaacttgtaggcctgataagcgcagcgtatcaggcaatttttataatttaaacactgctttcaactttataatctttgaaataatagtgcttatcccggtcgtttatttcgcgaataacccgacaaggaacgccagccgccacgacgtttggtggaatgtcttttgtgacgatactacccgcgccaataacagaattatccccgatggtgacgcctggattaataaccacatgacttccgatccagacgttattgccaatcgttatcggaaaagagtacatctcgccgttttttctcaattcatggtgtacagggtgtcccgtaacggaaagagtaacgttgggtgcaatcagtacgttatcaccgattgttaccgtgtagtcatcgacaatggttaaattgaaatttgcataaaaattgcggcctatatggatgttggaaccgtaagagaaatagacaggcggttctacccaggcgttttcccctaccgtggcaaacatttctttaatcaggctttctcttttttcaacttcacttggatggctgtgattaaactcatacattaacgttttcccacgaagtcttttttccggtaagccttcgcacatatcggtaaatagcttgcctgctcttattctttcggtcattggcatgttcaatgcgatcactccgttatgatatgttggtcggataaggcgctcgcgccgcatccgacattgattgcttaagcgacttcattcacctgacgacgcagcagggaaagcgggccggggccgctaagcgtgaacacggaaattaaggtgaagcccagcgccaccagacccagcaccagataagcgccctggaaaccgatgctttcatacatattgcccgccagtacagacataaaaatcatcgccagttgcttaaagaagcagaaacagaccagataaatcgtcgcactaaaacgcacttcaaactggctggtaatatatttaaagcagcccaccagcaggaacggtacttcaaacatatgcagcgttttcagaataaccacttccagcgcactggtggcgaagctactgccaataatacgtacagacataatagtgccagccagcagcagggcgtttttcccaccgatgcgattaatgatcagtggcgcaaagaacataatgctggcgttaagtaattcgcccattgtcgttacgtagccaaatacccgcgtaccctgttcaccggtagcaaagaagctagtaaagaaattagcaaactgttggtcaaaaacatcgtaggtgcaggaaacgccaataacatacagactcaaaaaccacagttttggctgtctgaacagttccagtgccagcttaaggctaaatgcgctatggttggcacctaccgcattggcaaccgtggcagaagagggcgcatccgttttggcgaaaaagagtaaaacggcgaggatgagtgcacagccagagcccagccagaaaacaaactgattattgatggtgaacatgatgccgacaatgctggcacacagcgcccagccaacacagccaaacatccgcgcgcgaccaaattcgaaattactgcgacggctgactttctcaataaatgcctctactgctggcgcaccggcgttaaaacaaaagcctagataaataccaccaacaatgcttcctactaaaatgttgtattgtaacagtggcccgaagataaaaataaagaacggcgcaaacatcactaacatgccggtaataatccacagcaggtatttgcgcagcccgagtttgtcagaaagcagaccaaacagcggttggaataataggctgaacagagaaatagcggcaaaaataatacccgtatcacttttgctgatatggttgatgtcatgtagccaaatcgggaaaaacgggaagtaggctcccatgataaaaaagtaaaagaaaaagaataaaccgaacatccaaaagtttgtgttttttaaatagtacataatggatttccttacgcgaaatacgggcagacatggcctgcccggttattattatttttgacaccagaccaactggtaatggtagcgaccggcgctcagctggaattccgcgcttacactcgggctccaggagtcgtcgccaccaatccccatatggaaaccgtcgatattcagccatgtgccttcttccgcgtgcagcagatggcgatggctggtttccatcagttgctgttgactgtagcggctgatgttgaactggaagtcgccgcgccactggtgtgggccataattcaattcgcgcgtcccgcagcgcagaccgttttcgctcgggaagacgtacggggtatacatgtcactcaatggcagatcccagcggtcaaaacaggcggcagtaaggcggtcgggatagttttcttgcggccctaatccgagccagtttacccgctctgctacctgcgccagctggcagttcaggccaatccgcgccggatgcggtgtatcgctcgccacttcaacatcaacggtaatcgccatttgaccactaccatcaatccggtaggttttccggctgataaataaggttttcccctgatgctgccacgcgtgagcggtcgtaatcagcaccgcatcagcaagtgtatctgccgtgcactgcaacaacgctgcttcggcctggtaatggcccgccgccttccagcgttcgacccaggcgttagggtcaatgcgggtcgcttcacttacgccaatgtcgttatccagcggtgcacgggtgaactgatcgcgcagcggcgtcagcagttgttttttatcgccaatccacatctgactaagaaagccactctggcggttaaattgccaacgcttattacccagctcgatgcaaaaatccatttcgctggtggtcagatgcgggatggcgtgggacgcggcggggagcgtcacactgaggttttccgccagacgccactgctgccaggcgctgatgtgcccggcttcactccatgcggtcgcgttcggttgcactacgcgtactgtgagccagagttgcccggcgctctccggctgcggtagttcaggcagttcaatcaactgtttaccttgtggagcgacatccagaggcacttcaccgcttgccagcggcttaccatccagcgccaccatccagtgcaggagctcgttatcgctatgacggaacaggtattcgctggtcacttcgatggtttgcccggataaacggaactggaaaaactgctgctggtgttttgcttccgtcagcgctggatgcggcgtgcggtcggcaaagaccagaccgttcatacagaactggcgatcgttcggcgtatcgccaaaatcaccgccgtaagcgctccacgggttgccgttttcatcatatttaatcaggctctgatccacccagtcccagacgaagccgccctgtaaacggggatactgacgaaacgcctgccagtatttagcgaaaccgccaagactgttacccatcgcgtgggcgtattcgcaaaggatcagcgggcgcgtctctccaggtaggctaagccattttttgatggaccatttcggcacagccgggaagggctggtcttcatccacgcgcgcgtacatcgggcaaataatatcggtggccgtggtgtcggctccgccgccttcatactgcaccgggcgggaaggatcgacagatttgatccagcgatacagcgcgtcgtgattagcgccgtggccactttcattccccaggctccagatgatcacactcgggtgattacgatcgcgctgcaccattcgcgttacgcgttcgctcatcgccggtagccagcgcggatcatcggtcagacgattcattggcaccatgccgtgggtttcaatattggcttcatccaccacatacaggccgtagcggtcgcacagcgtgtaccacagcggatggttcggataatggctacagcgcacggcgttaaagttgttctgcttcatcagcaggatatcctgcaccatcgtctgctcatccatgacctgaccatgcagaggatgatgctcgtgacggttaacgcctcgaatcagcaacggcttgccgttcagcagcagcagaccattttcaatccgcacctcgcggaaaccgacatcgcaggcttctgcttcaatcagcgtgccgtcggcggtgtgcagttcaaccaccgcacgatagagattcgggatttcggcgctccacagtttcgggttttcgacgttcagacgtagtgtgacgcgatcggcataaccaccacgctcatcgataatttcaccgccgaaaggcgcggtgccgctggcgacctgcgtttcaccctgccataaagaaactgttacccgtaggtagtcacgcaactcgccgcacatctgaacttcagcctccagtacagcgcggctgaaatcatcattaaagcgagtggcaacatggaaatcgctgatttgtgtagtcggtttatgcagcaagctgacgtcacggaaaatgccgctcatccgccacatatcctgatcttccagataactgccgtcactccagcgcagcaccatcaccgcgaggcggttttctccggcgcgtaaaaatgcgctcaggtcaaattcagacggcaaacgactgtcctggccgtaaccgacccagcgcccgttgcaccacagatgaaacgcgctgttaacgccatcaaaaataattcgcgtctggccttcctgtagccagctttcatcaacattaaatgtgaggctgtaacaacccgtcggattctccgtgggaacaaacggcggattgaccgtaatgggataggtcacgttggtgtagatgggcgcatcgtaaccgtgcatctgccagttactggggacgacgacagtatcggcctcaggaagatcgcactccagccagctttccggcaccgcttctggtgccggaaaccaggcaaagcgccattcgccattcaggctgcgcaactgttgggaagggcgatcggtgcgggcctcttcgctattacgccagctggcgaaagggggatgtgctgcaaggcgattaagttgggtaacgccagggttttcccagtcacgacgttgtaaaacgacggccagactatccgtaatcatggtcatagctgtttcctgtgtgaaattgttatccgctcacaattccacacaacatacgagccggaagcataaagtgtaaagcctggggtgcctaatgagtgagctaactcacattaattgcgttgcgctcactgcccgctttccagtcgggaaacctgtcgtgccagctgcattaaactatcggccaacgcgcggggagaggcggtttgcgtattgggcgccagggtggtttttcttttcaccagactgacgggcaacagctgattgcccttcaccgcctggccctgagagagttgcagcaagcggtccacgctggtttgccccagcaggcgaaaatcctgtttgatggtggttaacggcgggatataacaactgctgtcttcggtatcgtcgtatcccactacgctgatatccgcaccaacgcgcagcccggactcggtaatggcgcgcattgcgcccagcgccatctgatcgttggcaaccagcatcgcagtgggaacgatgccctcattcagcatttgcatggtttgttgaaaaccggacatggcactccagtcgccttcccgttccgctatcggctgaatttgattgcgagtgagatatttatgccagccagccagacgcagacgcgcgctgacagaacttaatgggcccgctaacagcgcgatttgctggtgacccaatgcgaccagatgctccacgcccagtcgcgtaccgtcttcatgggagaaaataatactgttgatgggtgtctggtcagagacatcaagaaataacgccggaacattagtgcaggcagcttccacagcaatggcatcctggtcatccagcggatagttaatgatcagcccactgacgcgttgcgcgagaagattgtgcaccgccgctttacaggcttcgacgccgcttcgttctaccatgctcaccaccacgctggcacccagttgatcggcgcgagatttaatcgccgcgacaatttggctcggcgcgtgcagggccagactggaggtggcaacgccaatcagcaagctctgtttgcccgccagttgttgtgccacgcggttgggaatgtaattcagctccgccatcgccgcttccactttttcccgcgttttcgcagaaacgtggctggcctggttcaccacgcgggaaacggtctgataagagacaccggcatactctgcgacatcgtataacgttactggtttcacattcaccaccctgaattgactctcttccgggcgctatcatgccataccgcgaaaggttttgcgccattcgatggtgtcaacgtaaatgcatgccgcttcgccttccggccaccagaatagcctggctttcaaccccttcttcgatctgttttgctacccgttgtagcgccggaagatgcttttccgctgcctgttcaatggtcattgcgctcgccatatacaccagattcagacagccaatcacccgttgttcactgcgcagcggtacggcgatagaggcgatcttctcctcctgatcccagccgcggtagttctgtccgtaaccctctttgcgcgcgcgcgccagaatggcttccagctttaacggttcccgtgccagttgatagtcatcaccggggcgggaggctaacatttcgattaattccttgcggtcttgttccgggcaaaaggccagccaggtcaggccgctggcggttttcagaagcggcaaacgtcgcccgaccattgcccggtgaaaggataagcggctgaaacggtgagtggtttcgcgtaccaccattgcatcaacatccagcgtggacacatctgtcggccataccacttcgcgcaacagatcgcccagcagtggggccgccagtgcagaaatccactgttcgtcacgaaatccttcgcttaattgccgcactttgatggtcagtcgaaaactatcatcggaggggctacggcggacatatccctcttcctgcagcgtctccagcagtcgccgcacagtggtgcgatgcaggccgctgagttccgccagcagcccgacgctggcaccgccatcaagtttatttaacatatttaataacattagaccgcgggttaagccgcgcacggttttgtattccgtctgctcattgttctgcatattaatactcatttctatagttaaaacaacgtggtgcacctggtgcacattcgggcatgttttgattgtagcgctaaacacccttcctatactgagcgcacaataaaaaatcatttacatgtttttaacaaaataagttgcgctgtactgtgcgcgcaacgacattttgtccgagtcgtgaggtactgaaatggcaatacaacaccctgacatccagcctgctgttaaccatagcgttcaggtggcgatcgctggtgccggcccggttgggctgatgatggcgaactatctcggccagatgggcattgacgtgctggtggtggagaaactcgataagttgatcgactacccgcgtgcgattggtattgatgacgaggcgctgcgcaccatgcagagcgtcggcctggtcgatgatgttctgccgcacactacgccgtggcacgcgatgcgttttctcaccccgaaaggccgctgttttgctgatattcagccaatgaccgatgaatttggctggccgcgccgtaacgcctttattcagccgcaggtcgatgcggtgatgctggaaggggtgagccgttttccgaatgtgcgctgcttgttttcccgcgagctggaggccttcagtcagcaagatgacgaagtgaccttgcacctgaaaacggcagaagggcagcgggaaatagtcaaagcccagtggctggtagcctgtgacggtggagcaagttttgtccgtcgcactctgaatgtgccgtttgaaggtaaaactgcgccaaatcagtggattgtggtagatatcgccaacgatccgttaagtacgccgcatatctatttgtgttgcgatccggtgcgcccgtatgtttctgccgcgctgcctcatgcggtacgtcgctttgaatttatggtgatgccgggagaaaccgaagagcagctgcgtgagccgcaaaatatgcgcaagctgttaagcaaagtgctgcctaatccggacaatgttgaattgattcgccagcgtgtctacacccacaacgcgcgactggcgcaacgtttccgtattgatcgcgtactgctggcgggcgatgccgcgcacatcatgccggtatggcaggggcagggctataacagtggtatgcgcgacgcctttaacctcgcatggaaactggcgttggttatccaggggaaagcccgcgatgcgctgctcgatacctatcaacaagaacgtcgcgatcacgccaaagcgatgattgacctgtccgtgacggcgggcaacgtgctggctccgccgaaacgctggcagggtacgttacgtgacggcgtttcctggctgttgaattatctgccgccagtaaaacgctacttcctcgaaatgcgcttcaagccgatgccgcaatattacggcggtgcgctgatgcgtgagggcgaagcgaagcactctccggtcggcaagatgtttattcagccgaaagtcacgctggaaaacggcgacgtgacgctgctcgataacgcgatcggcgcgaacttcgcggtaattggctggggatgcaatccactgtgggggatgagcgacgagcaaatccagcagtggcgcgcgttgggcacacgcttcattcaggtggtgccggaagtgcaaattcataccgcacaggataaccacgacggcgtactacgcgtgggcgatacgcaaggtcgcctgcgtagctggttcgcgcaacacaatgctagcctggtggtgatgcgcccggatcgctttgttgccgccaccgccattccgcaaaccctgggcaagaccctgaataaactggcgagcgtgatgacgctgacccgccctgatgccgacgtttctgtcgaaaaggtagcctgatatgcacgcttatcttcactgtctttcccacagcccgctggtggggtatgtcgacccggcgcaagaggtgctcgatgaggtcaatggcgtgattgccagcgcccgcgagcgtattgcggcattctcccctgaactggtggtgctgtttgcgccagatcactacaacggctttttctatgacgtgatgccaccgttctgtttaggcgttggagcgacggcaattggtgatttcggcagtgcggcaggagagctgcccgtgcctgtggagctggcggaggcctgtgcgcatgccgtcatgaagagcgggatcgatcttgccgtttcttactgtatgcaggtggaccacgggttcgcccagccgctggagttcctgctcggtgggctggataaggtgccagttctgcctgtgttcatcaacggtgtcgccacgccgctgcccggtttccagcgtacccgcatgttgggtgaagccattggacgtttcaccagcactctcaataaacgcgtgctgttcctgggttccggtgggctttcccatcagccgccggtgcccgaactggcgaaagccgatgcccatatgcgcgaccgtctgttggggagcgggaaagatttacccgccagtgagcgcgaattgcgtcagcaacgggtgattagcgccgctgagaagtttgttgaggatcagagaacgctgcatccgctcaacccgatttgggataaccagttcatgactttgctggagcagggacgcatacaggaactggatgccgtcagtaacgaagagctttccgccattgccggaaagagcacacatgaaatcaaaacctgggtcgccgcttttgccgctatttctgcgtttggcaactggcgtagcgaagggcgttattaccgcccaatcccggagtggattgccggatttggcagcttaagcgccagaacagagaactgaatatgcaggagaagatgatgagttatcagccacaaaccgaagccgccaccagccgttttctgaatgtagaagaagcgggtaaaacgctgcgcatccattttaatgactgcggacaaggcgacgaaaccgttgtcctgctgcatggttccggcccgggtgctactggctgggcgaacttcagccgcaatatcgatccgctggtagaggcgggctatcgggtgatcctgctggattgtccgggttggggcaagagcgatagcgtcgttaatagtggtagccgaagcgatcttaatgcacgaatcctgaaaagcgtggtggatcaactggatatcgccaaaatccacctgctgggcaacagcatggggggccatagttctgtggcgttcacccttaaatggccggagcgcgtcggcaaactggtgctgatgggcggcggtacgggcggcatgagtttgtttacgccgatgccaaccgaaggtattaagcgactgaatcagctttatcgtcagccgactatcgaaaacctgaagctgatgatggatatcttcgtttttgataccagcgatttgaccgacgccctgtttgaagcgcgcctgaataatatgctgagccgccgcgatcacctggaaaacttcgttaagagcctggaagctaatccgaaacagttcccggattttggcccacgtctggcggaaatcaaagcgcaaaccctgattgtctgggggcgcaacgaccgctttgtgccgatggatgcgggtctgcgtctgctgtccggcattgccggttctgaactgcatatcttccgcgactgtggtcactgggcgcagtgggaacatgccgacgctttcaatcaactggtgctgaatttcctcgcacgcccttaaggaatggtcatgacgaagcatactcttgagcaactggcggcggatttacgccgcgccgcagagcagggcgaagcgattgcaccgctgcgcgatctgattggtatcgataacgctgaagcggcttacgccattcagcacataaatgtgcaacatgacgttgcgcaggggcgtcgcgtggtagggcgtaaagtgggcctgacacatccgaaagtgcaacaacaactgggcgttgatcaaccggattttgggacgttatttgccgacatgtgttatggcgataacgaaatcattcctttttcccgtgttctgcaaccccgcattgaagcggagatcgcactggtgttgaaccgcgatttgcccgcaaccgatatcaccttcgacgaattgtataacgccattgaatgggtacttccggcgctggaagtggtggggagccgcattcgcgactggagcattcagtttgtcgataccgtggcagataacgcctcctgtggggtgtatgtcatcggcggtccggcgcaacgtccggcggggttagacctgaaaaactgcgccatgaagatgacgcgtaataacgaagaggtttctagcgggcgcggcagcgaatgcctgggacatccgcttaatgcggccgtctggctggcacgcaaaatggccagtctgggtgaaccgctgcgcaccggagatatcattcttaccggggcattaggtccgatggtggcggtgaatgcgggcgatcgttttgaagcccatattgaaggcataggtagtgttgctgcgacatttagtagcgcagccccaaaaggaagtctgagttgagctaagccccaaaaggaagtctgtcatgagtaagcgtaaagtcgccattatcggttctggcaacattggtaccgatctgatgattaaaattttgcgtcacggtcagcatctggagatggcggtgatggttggcattgatcctcagtccgacggtctggcgcgcgccagacgtatgggcgtcgccaccacccatgaaggggtgatcggactgatgaacatgcctgaatttgctgatatcgacattgtatttgatgcgaccagcgccggtgctcatgtgaaaaacgatgccgctttacgcgaagcgaaaccggatattcgcttaattgacctgacgcctgctgccatcggcccttactgcgtgccggtggttaacctcgaggcgaacgtcgatcaactgaacgtcaacatggtcacctgcggcggccaggccaccattccaatggtggcggcagttagtcgcgtggcgcgtgttcattacgccgaaattatcgcttctatcgccagtaaatctgccggacctggcacgcgtgccaatatcgatgaatttacggaaaccacttcccgagccattgaagtggtgggcggcgcggcaaaagggaaggcgattattgtgcttaacccagcagagccaccgttgatgatgcgtgacacggtgtatgtattgagcgacgaagctagtcaagatgatatcgaagccagtatcaatgaaatggctgaggcggtgcaggcttacgtaccgggttatcgcctgaaacagcgcgtgcagtttgaagttatcccgcaggataaaccggtcaatttaccgggcgtggggcaattctccggactgaaaacagcggtctggctggaagtcgaaggcgcagcgcattatctgcctgcctatgcgggcaacctcgacattatgacttccagtgcgctggcgacagcggaaaaaatggcccagagtctggcgcgcaaggcaggagaagcggcatgaacggtaaaaaactttatatcagcgacgtcacattgcgtgacggtatgcacgccattcgtcatcagtatagcctggaaaacgttcgccagattgccaaagcactggacgatgcccgcgtggatagcattgaagtggcccacggcgacggtttgcaaggttccagctttaactatggtttcggcgcacatagcgaccttgaatggattgaagcggcggcggatgtggtgaagcacgccaaaatcgcgacgttgttgctgccaggaatcggcactattcacgatctgaaaaatgcctggcaggctggcgcgcgggtggttcgtgtggcaacgcactgtaccgaagctgatgtttccgcccagcatattcagtatgcccgcgagctcggaatggacaccgttggttttctgatgatgagccatatgaccacgccggagaatctcgccaagcaggcaaagctgatggaaggctacggtgcgacctgtatttatgtggtggattctggcggtgcgatgaacatgagcgatatccgtgaccgtttccgcgccctgaaagcagagctgaaaccagaaacgcaaactggcatgcacgctcaccataacctgagtcttggcgtggcgaactctatcgcggcggtggaagagggctgcgaccgaatcgacgccagcctcgcgggaatgggcgcgggcgcaggtaacgcaccgctggaagtgtttattgccgccgcggataaactgggctggcagcatgggaccgatctctatgcgttaatggatgccgccgacgacctggtgcgtccgttgcaggatcgaccggtacgagtcgatcgcgaaacgctggcgctgggatacgctggtgtttacagcagcttcctgcgtcactgtgaaacggcggcggcgcgttatggcttaagtgcggtggatattctcgttgagctgggcaaacgccggatggttggcggccaggaggatatgatcgttgacgtggcgctggatctgcgcaacaacaaataatgatgactgccgagaacgtgcattttgtatgcccatcccagcacgactgccggatgcggcgtgaacgccttatccggcctacggatggcgtgagaatttgtaggtctgataagacgcgttagcgtcgcatcaggcatctgcgcacgactgccggatgcggcgtgaacgccttatccggcctacggatggcgcgggaatttgtaggcctgataagacgcgttagcgtcgcatcaggcatctgcgcacgactgccggatgcggcgtgaacgccttatccggcctacgggtggcgcgagaatttgtaggcctgataagacgcgttagcgtcgcatcaggcatctgcgcacgactgccggatgcggcgtaaacgccttatccggcctacggatggcgcgggaatttgtaggcctgataagacgcgttagcgtcgcatcaggcatctgcacacgactgccggatgcgataaacgtcttgtccggcctacatttcgcccgtaggcagtcattaaatagttctgattacgcggctggcaatgtatcagtcgcgattcacctgcactcgcaacgaggttcatcttatgagcactcgtacccctagtagttctagttcccgcctgatgctgaccatcgggctttgttttttggtcgctctgatggaagggctggatcttcaggcggctggcattgcggcgggtggcatcgcccaggctttcgcactcgataaaatgcaaatgggctggatatttagcgccggaatactcggtttgctacccggcgcgttggttggcggaatgctggcggaccgttatggtcgcaagcgcattttgattggcagtgttgcgctgtttggtttgttcagtctggcaacggcgattgcctgggatttccccagtctggtctttgcgcggctgatgaccggtgtcgggctgggggcggcgttgccgaatcttatcgccctgacgtctgaagccgcgggtccacgttttcgtgggacggcagtgagcctgatgtattgcggtgttcccattggcgcggcgctggcggcgacactgggtttcgcgggggcaaacttagcatggcaaacggtgttttgggtaggtggtgtggtgccgttgattctggtgccgctattaatgcgctggctgccggagagcgcggttttcgctggcgaaaaacagtctgcgccaccactgcgtgccttatttgcgccagaaacggcaaccgcgacgctgctgctgtggttgtgttatttcttcactctgctggtggtctacatgttgatcaactggctaccgctacttttggtggagcaaggattccagccaagccaggcggcaggggtgatgtttgccctgcaaatgggggcggcaagcgggacgttaatgttgggcgcattgatggataagctgcgtccagtaaccatgagcctactgatttatagcggcatgttagctagcctgctggcgcttggaacggtgagcagttttaacggtatgttgctggcgggatttgtcgcggggttgtttgcgacaggtgggcaaagcgttttgtatgccctggcaccgttgttttacagtagccagatccgcgcaacaggtgtgggaacagccgtggcggtagggcgtctgggggctatgagcggtccgttactggccgggaaaatgctggcattaggcactggcacggtcggcgtaatggccgcttctgcaccgggtattcttgttgctgggttggcggtgtttattttgatgagccggagaagtcgaatacagccgtgcgccgatgcctgacgtgccttattaggcaggggcgaaagggacttcaccccaatacacctacggcgtttacaggtatactcgctaaaaattattcagcgggtttggaaacaaagatggcaaaacttaccttacaagagcagttgctcaaagcaggattagtcaccagcaaaaaagcggcgaaggtggagagaacggcgaaaaaaagccgcgttcaggcgcgtgaagctcgggcggcggtagaagaaaataaaaaggcacagcttgagcgtgataaacagcttagcgaacagcaaaaacaagcggcgttggcgaaagaatataaagctcaggtgaagcagcttattgaaatgaaccgaatcaccattgccaatggcgatattggttttaacttcactgacggcaatctgattaagaagatttttgtcgataagctcacacaggcgcagttgattaatggtcgtctggcgattgcccgcttgttggtcgataacaatagcgaaggtgaatacgccattattcccgccagcgttgccgataaaattgctcagcgcgatgccagcagtatagtgttgcacagcgcgctcagcgccgaagagcaggatgaagacgacccgtatgccgacttcaaagtgcctgatgatttgatgtggtaaacatagataagtcgtgcgcagatgcctgatgcgacgctatgcgcgtcttatcaggcctacggtttatgggcgaagtgtagaccggataaggcgttcacgccgcatccggcagtcgtgcgccatgcctgatgcgacgctttgcgcgtcttatcaggcctacggcttacgggcgaagtgtaggccggataaggcgttcacgccgcatccggcagtcgtgctattatcaacgcatattcagtttattggcgtggtaggcaatatgctcgccaataaaactggagacaaaataatagctgtgatcataaccctcgtgataacggattaacgtcttgatattcatctcctggcagatcttttcaagatttggagtccgcagctgttctgcgtaaaaatcatcactcaacccctgatcaaccatgatttccgcaacgcgttgaccttgactaataagactcaccgggtcgtaatccaaccaggcatctttattttcagcaagatatgcagcaaaggcttgctgtccccacggcacttggcttggggagacaatggggctaaacgcgctgacgctgacatattcatctgggttacgtaacgccagcaccagcgcgcccagcccgcccatagaatgaccagagatagactttttggccgttgccggaaaatgatgcatcactaaatccggcagctcgttgcggatatagtcatacattttgtaatgttcattccacggcgcttgcgtcgcgttcaggtaaaacccggcaccttgcccgagatcgtaacggtcagcatctgcgacatgactgcctcgcggactggtgtccggcgcaacaacaataatgttgtgctcagccgcgtaacgctgcatcccgcttttagtaatgaaattctgctcgttgcaggtcaggccactaagccagtacagcaccggcaatttttcattcgcggcttttggtgggagatagacgccgacattcatttcacatttcagactttgggaataatgccgatacatattttgccagccgccaaagctgacatgtttttcaatgagttccatcagtcattatctcagggttaatcccccggacggctgcccggggagagtattaagaacccccgcctgaagtggacggggtaaacctgcgggaaatcagtaacgaattacggttcgaatggatttgccttcatgcatcaggtcgaaggcgtcattaatttcatccaggctcatggtatgcgtgacaaacggttccagatcgatatcacctttcatcgcatcttcaaccatgcccggtaactgggaacgacctttcacgccgccaaacgcggaacctttccatacgcgaccagtgaccaactggaatggacgggtggagatttcctgaccggcaaccgcgaccccgatgatcacgctctgaccccagccgcggtgcgcactttccagcgccgcacgcatcacgttgacgttaccgatgcattcaaaggtatggtcgataccccatttgttgatatccaacaggacatcttttatcggtttgtcgtagtcattcgggttaatgcagtcggtagcaccgaagcgacgcgccagatcgaatttcttcgggttggtatcgatagcgataatccgacccgctttcgcctgacgcgcgccctgaaccactgccagaccaatcgcgccaagaccaaacacggcaacagaatcacctggctggactttagctgtgttgtgtaccgcgccaataccggtggtcacgccacagcccagcaggcagacgtgttcatggtttgcttctggattaatttttgccagagacacttccgcgactacggtgtattcactgaatgtagagcaccccatgtagtgataaagcggctgcccgttgtaagaaaaacgggtggtgccgtctggcatcaggcctttaccctgggtttcgcgaaccgcaacacagaggttagttttgccagaacgacagaactcacactcgccgcactccgcggtgtaaagcgggatcacatggtcgccaggtttgacgctggttacgccttcaccgacttcaaccacaacgccggccccttcgtgaccgagaaccaccgggaatacaccttccgggtcatcgccggagagggtaaatgcgtcggtatggcaaacgccggtatgggtgactttaattagcacttcaccttttttcggtggtgcaacgtcaatttcaacgatttccagcggtttaccgggagcaaatgcaacggcagcacgacttttcatctctcgctcttcctcaatatggtaatagattcagttatttaagataggcacgaaccagttcaatagtgtcgtcaacggattggctgacttcgcggctgtagcagtcatttcggtcaaacgtttcccggatatggctttcaagcacttctgccatcagcccattagccgcgccccgaacggcagcgatctgttggagtatggcacggcattcggcatcaccctccaggctccgttccagagcatcaatctgcccccgaatacgacgaactcgagtaaggacctttttcttctcttccggagtactgggcatttcgcacctcatcatctgcatgcaatatactataggggggtattctatatgtcaatgcatacccccctatagtatataacactggagaataaaatttatccggtgaatgtggtcggaaaacaaagaggaaaggggggggggctaatcggcagggaaggccgccccggatagcgggcggcagaaggaatcagaatttccaggtcagacgggctgcaagttgcagaccgttacgagatggacggtcccctcgcccccttggggagagggttagggtgagggggcgttcaccgtactttcaacaggttaactccccctttctgagaggaaacaaaattaacgcagaatcttcttctcagccaaatccagcgcaaagtagctgaaaatcagatccgcacccgcacgcttaatgctacctaagctttcgagcacgactttctcttcatctatagcacccgccagcgcggcgaacttaatcatcgcatactcaccgctcacctgatacgcgccaatcggcaattcagtacgttcacgcagctcacgcacgatgtcgaggtacgctccagcaggtttaaccatcaggcagtctgcgccctgggcttcatccagcagactttcacgaatcgcctcacgacggttcattgggttcatctgatagcttttgcggtcgccttttaatgcgcttccggcagcttcacggaacgggccataaaaggaggaggcgaacttggtgctatagctcataatcgccgtatctttaaatcccgcagcgtccagcgcctgacgaatcgcctgtacctggccgtccatcgcggcggaaggggcgatgaagtctgcacctgcagcagctgcaaccacggcttgcttgcctaaattttccagagtcgcgtcgttgtcgacgccatgctcgcacagcacaccgcagtgaccgtgagaagtgtattcacagaagcaggtgtcactcataacgatcatttctggcacggtctgcttgcagatgcggctcatacgcgccaccagtccatcttcccgccaggcatcgctgccggtttcatcggtatggtgagagatgccaaaagtcatcacggaacgaataccggcgttggcgatgcgttcaatttcgcgtgccagatgtttctctggaatgcgcatcacgcctggcatggcttcaacggctttgtagtcgtcaatttcttcttcaacaaagatcggcaacaccaggtcgttaaggctaagtgttgtctcttcaaacatagcgcgcagcgcaggagatttgcgcaggcgacgagggcgttggattaagtctgtcatggtctgcctgatgtttgtggaatcgaggggcatagtatacctgaagcagggtagggatgttttacgaaagttgtcgcgatgttgacaagaagagaatggaagagaggccaggacatctttttaatagaaacagcaataattttatattcactgaaaatatttttaatcttgaatattatcgggcgttaaaatattacattgtggttttcaatgcgttatccgcagcgtgacgctccagcgccagttcaatcaaacgtgtgatcagatcggtgtaacccagaccgctggcttgccacagcttcggatacatactgatattagtgaagccaggcagggtgttgatctcgttgatcaccacttcgttctctggggttaaaaacacgtctacacgcgccatgcctgcgcatcccaacgtttgataagcctgaacggcaatcgcccggatcttatcgttgatttctggcgcaatggctgccggaactaccactttcgcgccatcttcgtcaatgtacttggtgtcgtaggcatagaaatcgctggtgagtacgatctctccacaggtgctggcttgcggattgtcgttgcccagaactgcgcattcgatctcacgacctttgatcccttgctcaacgatcactttatgatcgaactcgaacgccagatcgacggcaattgcgtactgttcttcactggttactttgctgacaccaacagaagagccctgattagccggttttacaaacagtggtaaccccagtttagactccacttcggcaaaactaatgttgtgacgattggcgcgcgtcagggtaataaatggcgcaatgttcagcccggcatcgcgtagcagacgtttggtgacatctttgtccatacaggctgcactagccagaacatcagaacctacaaacggtaaattggcgacccgcagcattccctgcaaggaaccatcttcgcccagcgtaccgtggacaatcgggaaaatgacatccaccgtcggcaacggctgaccgttttgcgcgtcgataagctgatgctcatgtttacctggcacctgcgcaaggctggtcgcgctagggcgcaacgcaatatgggcaggatcgtctgcatttagcagataattgctggcatcgctgacgtgccattgcccttgtttatcaatgcccagcagcacaacgtcgaagcgacttttatcaatggcatcgacaatgttttttgcgctttgcagagacacttcatgttccgcacttttaccaccaaaaacgattcctacccgcagtttttccatcttaaaaacctatcccgtctaacacaaagtgcatacattaccacgacaaaacgggggattcgcggccttctgaaagattgttgcaatcttctgctgacaaagcgtgcaacgtactggtgaagaaagtgcgttatctcaaagatgtgcgcaagatcacaaaaatgatgaacgggaagctaatttattcctggcttaaatggccatgcggtgagtttttttctcttaattataagttaacgaagagaatatatttcataacttttatttataataaaggttgataattaaaagcctatattttgtgtgggtaattatttaaataagagaaacgtttcgctggtaatcaaacaaaaaatatttgcgcaaagtatttcctttgtcataaaaataatacttccagacactatgaagttgtgaaacataatgttaacttctccatactttggataaggaaatacagacatgaaaaatctcattgctgagttgttatttaagcttgcccaaaaagaagaagagagcaaagaactgtgtgcgcaggtagaagctttggagattatcgtcactgcaatgcttcgcaatatggcgcaaaatgaccaacagcggttgattgatcaggtagagggggcgctgtacgaggtaaagcccgatgccagcattcctgacgacgatacggagctgctgcgcgattacgtaaagaagttattgaagcatcctcgtcagtaaaaagttaatcttttcaacagctgtcataaagttgtcacggccgagacttatagtcgctttgtttttattttttaatgtatttgtacatggagaaaataaagtgaaacaaagcactattgcactggcactcttaccgttactgtttacccctgtgacaaaagcccggacaccagaaatgcctgttctggaaaaccgggctgctcagggcgatattactgcacccggcggtgctcgccgtttaacgggtgatcagactgccgctctgcgtgattctcttagcgataaacctgcaaaaaatattattttgctgattggcgatgggatgggggacagcgaaattactgccgcacgtaattatgccgaaggtgcgggcggcttttttaaaggtatagatgccttaccgcttaccgggcaatacactcactatgcgctgaataaaaaaaccggcaaaccggactacgtcaccgacagcgctgcaagtgcaaccgcctggagtaccggtgtcaaaacctataacggcgcgctgggcgtcgatattcacgaaaaagatcacccaacgattctggaaatggcaaaagccgcaggtctggcgaccggtaacgtttctaccgcagagttgcaggatgccacgcccgctgcgctggtggcacatgtgaccagccgcaaatgctacggtccgagcgcgaccagtgaaaaatgtccgggtaacgctctggaaaaaggcggaaaaggaagcattaccgaacagctgcttaacgctcgtgccgacgttacgcttggcggcggcgcaaaaacctttgctgaaacggcaaccgctggtgaatggcagggaaaaacgctgcgtgaacaggcacaggcgcgtggttatcagttggtgagcgatgctgccagtctgaatagcgtgacggaagcgaatcagcaaaaacccctgcttggcctgtttgctgacggcaatatgccagtgcgctggctaggaccgaaagcaacgtaccatggcaatatcgataagcccgcagtcacctgtacgccaaatccgcaacgtaatgacagtgtaccaaccctggcgcagatgaccgacaaagccattgaattgttgagtaaaaatgagaaaggctttttcctgcaagttgaaggtgcgagtatcgataaacaggatcatgctgcgaatccttgtgggcaaattggcgagacggtcgatctcgatgaagccgtacaacgggcgctggaattcgctaaaaaggagggtaacacgctggtcatagtcaccgctgatcacgcccacgccagccagattgttgcgccggataccaaagctccgggcctcacccaggcgctaaataccaaagatggcgcagtgatggtgatgagttacgggaactccgaagaggatagtcaagaacataccggcagtcagttgcgtattgcggcgtatggcccgcatgccgccaatgttgttggactgaccgaccagaccgatctcttctacaccatgaaagccgctctggggctgaaataaaaccgcgcccggcagtgaattttcgctgccgggtggtttttttgctgttagcaaccagacttaatggcagatcacgggcgcatacgctcatggttaaaacatgaagagggatggtgctatgaaaataacattactggttaccttgcttttcggtctggtttttttaaccaccgtcggcgctgccgagagaactttaaccccacaacaacagcgtatgacctcctgtaatcagcaggcgacggcgcaggcgttgaaaggggatgctcgtaagacctacatgagtgattgcctgaagaacagcaagtctgcgcctggcgaaaaaagtttgacgccacagcagcaaaagatgcgcgaatgcaataatcaagcaacacaacaatctctgaaaggtgatgatcgtaataagtttatgagtgcctgcctcaagaaagccgcctgatacctgatagtgctaacgggtgagctacgaaaatggctcacccgaaatatcatacttctgcctttagctccgtctctataatttgggaaaattgtttctgaatgttcccaaaaataatgaatgatgaaaactttttcaaaaaagcggcggcgcacggggaggaacctcctttaactcctcaaaacgaacatcagcggtccgggctgcgcttcgcccgtcgcgtcagactaccccgtgcggttggcctggctggcatgttcttaccgattgctagtacgctggttagtcacccgccgccgggctggtggtggctggtgttggtcggctgggcgttcgtctggccgcatttagcctggcagatagcgagcagggccgtcgatccgcttagccgggaaatttacaacttaaaaaccgatgcagtattagcgggaatgtgggtaggcgtaatgggcgtaaacgtgctgccttccaccgcgatgttgatgattatgtgtctgaatttgatgggggcaggcggcccccgtctgtttgtcgcgggtctggtgttgatggtggtttcctgccttgtcaccctcgagctgacgggcattaccgtgagcttcaatagtgcgccgctggaatggtggctctcccttcccattattgtcatttatcctctgctgtttggctgggtcagctaccagacggcaaccaaactggcggaacataaacgcaggttgcaggtcatgagtacccgcgacggcatgacgggcgtgtataaccgacgtcattgggaaactatgttacgcaatgaatttgataactgtcggcggcataatcgcgatgcaacgttactgattatcgatatcgaccatttcaagagcatcaacgatacctggggccatgatgtgggcgatgaagcgattgtggcgcttacccgacagttacaaattaccctgcgcggtagcgatgtgattggtcggtttggcggcgatgagtttgcagtaatcatgtccggtacgccagctgagagcgccattaccgccatgttacgggtgcatgaagggctaaatacattacgtttgccgaatacgccacaggtaactttacggattagtgtgggggttgcgccgctgaacccacaaatgagtcactatcgtgagtggttgaaaagcgcagatttggcgctttacaaagcaaagaaagccggacgtaaccgcaccgaagtggcggcctgacgtccggcgaaagtcatcaggatttgctgagtttttcacttttttccatacacttcgtcatcgcttcgatcactgcagcacggaagcctttctcttccagtacgcgtaccgcttcaatggtggtgcctcccggactgcagaccatatctttcagtgcccccggatgttctcccgtttccagcaccatttttgcggaacccattaccgcctgagcggcaaatttatacgcctgggcgcgtggcatcccgcccagcacggcggcgtcggccatcgcttcgataaacataaatacgtaggctgggctagaaccgctcacaccgaccaccgggtggatcatcggctcagcaattacttccgcttcgccaaagcagcggaaaatattcagcacatcagcggtatcttctggggttaccagcgcgtttggcgttacggaggtcatcccggcattaaccagtgcgggagtgttcggcatggcgcggataattttccggtcatggcccagcgcgcgggcaagctggtcgagcgtgacacctgcagcaatagaaacgaccagagagtctttattcaggctggaggtgatttcgctaagcactttaatcatgatgccaggtttaacggcagcaaaaatgatgtcggcgatttgcgccacttcttgcgcgctttctgcggcgttgatgccgaactggtcatgcagggcggcgactttatccggggagggggtgtatacccagatttgccctggaagcacctgaccgctggcaatcagaccgccgagaatggcttttcccatattgccgcagccaataaaaccgattttcttttccattgcctcactcctgccgtgaaattcattgttttgataatcgctggcagaagcataaacagaactatgccggaaggcaaaagcgcgacacaatagaggattacccaacaaaggatgactttatgacaatttgggtggatgccgacgcgtgtcccaatgtaattaaagagattttgtatcgcgcggcggaacgtatgcagatgccgctggtactggtagcaaaccagagtttacgcgtgccgccaagccgatttattcgtacgctgcgcgtcgcggcaggtttcgacgttgccgataacgaaattgtccggcagtgtgaagcgggcgatttggtgatcaccgcagatatacctttggctgctgaagccatcgagaaaggcgctgcggcgcttaatccgcgcggcgaacgttacacgccagcgaccattcgtgagcgcctgacgatgcgcgattttatggataccttacgtgccagtgggatccagaccggcggaccagatagccttagtcaacgtgaccgccaggcctttgccgcggagctggagaagtggtggctggaagtgcaacgtagtcgtggctaaatgtaatttattatttacacttcattcttgaatatttattggtatagtaaggggtgtattgagattttcactttaagtggaattttttctttacaatcgaaattgtactagtttgatggtatgatcgctattctcatgacaccggctttcgccgcattgcgacctattggggaaaacccacgatgacacaacctctttttctgatcgggcctcggggctgtggtaaaacaacggtcggaatggcccttgccgatagccttaaccgtcggtttgtcgataccgatcagtggttgcaaagtcagctcaatatgacggtcgcggagatcgtcgaaagggaagagtgggcgggatttcgcgccagagaaacggcggcgctggaagcggtaactgcgccatccaccgttatcgctacaggcggcggcattattctgacggaatttaatcgtcacttcatgcaaaataacgggatcgtggtttatttgtgtgcgccagtaagtgtcctggttaaccgactgcaagctgcaccggaagaagatttacggccaaccttaacgggaaaaccgctgagcgaagaagttcaggaagtgctggaagaacgcgatgcgctatatcgcgaagttgcgcatattatcatcgacgcaacaaacgaacccagccaggtgatttctgaaattcgcagcgccctggcacagacgatcaattgttgattttcgagcgcctatacttaacgttcatcccgtgaaataaggaagaacgatgccaacgaaaccgccttatcctcgtgaagcatatatagtgacgattgaaaaaggaaagccaggacagacggtaacctggtaccaactcagagccgatcatcctaaaccagacagcttgatcagtgaacatccgaccgctcaggaagcgatggatgcgaaaaaacgctatgaggaccctgacaaagagtgaccgcatcagactgctcggaagggattctgagtgccactacaagggatctgcgtcacatttttcataattcatgtttttctaataattagaatattaaacaataacaatccattactggaatcatttggaatctttacattatgccgtgcacgtctgctgctacgctttttgtcatttgtagcacaagtaagtgtcagcagtggtgcttcacacttgcccggtaattaacgacgaaagaaaagtaaggtggatgaacaatgagtgcgagcttggcgatcctgaccatcggcattgtacctatgcaggaagttttgccgctcctgacggaatacattgacgaagataatatttcccatcatagcctgctggggaagttaagtcgtgaagaagtgatggcggagtacgcgccagaagcaggcgaagacaccattctcacattattaaatgacaaccagctggcccatgttagccgtcgcaaagtggagcgtgacctgcaaggtgtggttgaagtgctcgataatcagggttatgacgtcattttattaatgagtacagcaaacattagtagtatgactgcgcgtaatacgatctttcttgagccgagccgaatattgcctccactggtttcctctattgttgaagatcatcaggtgggggttatcgttccggttgaggagatgctgcccgttcaggcgcaaaaatggcaaattttgcagaaaagcccggtatttagtttgggtaaccccattcatgatagtgaacaaaaaatcattgatgccgggaaagaattactggcaaaaggggctgatgtcatcatgctggattgtttaggatttcaccaacgtcatcgcgatttactgcaaaaacagctcgatgttcctgtcttgctgtctaacgtattgattgcacggctggctgcggaattactggtgtaattttgcgtgacagccagcgcctctggcccctatagtgaagtagatgttcaactaccaaacagggccagtttatgcttcaaagtaatgagtacttttccggcaaagtgaaaagtatcggcttttccagcagcagcactggtcgcgccagcgtgggtgttatggttgaaggcgaatacaccttcagcaccgctgagccggaagagatgacggtaatcagtggcgcgctgaatgtgttactgcctgacgcgaccgactggcaggtgtatgaagccggtagcgtgtttaatgttcccggtcacagtgagtttcatctgcaagttgccgaacccacctcttatctgtgccgctatctgtaattcctcgccttccccttgaacgggagggcatttttctgaaatatcctttctttagcccataataatatttcctttgctgcgattttttcaatttccgatatattcataatttatcaaggttgatataaatatcagtgaagatctccagatattgttgcggaactggctacgataaaagataaatcagatgatgaatggtggcgtgcattgctgcaaagtcgcaatgatcatttacgccaaacggcattgcgcaacgcacataccccggcgttgttgttaacgacattgactgagcctcaggatcggagcctggctattaataatccacagctggctgccgatgtgaaaacggcgtggttaaaagaggatccaagtttactcttatttgtcgaacaacccgatcttagcctgttacgtgatttagtgaaaaccggggcaacgcggaaaattcgcagtgaagcgcgtcaccggcttgaggaaaaacaatgacacaacgtccatggagcaagttacagcgtaaaacgcataatattgctgcgctaaaaattattgctcgccgtagcgaataattatatgcctggtgtggcttcgtacgccggataagacgcggcaggcgtcgcatccggcattaaaggaaaatcagcaattaacgttgtgcttcgccacctaatccttcaatcaggttttgaattaacgctgccagttcaccagtcatcaggatgaaatcggcatcaaaacgctgggcgaaatcttcacggtcgatatcttcgttttgatcgcgcagctcgtcgcagaacttcagacgcttgaggctaccatcgtcgcacatcacaaactgaatgcgctgctgccagtcgagcgccagtttagtcaccacttttccggcttcaatgtgattggtgatctcttcgctggtcagatcttgtttcttcgcgcggatcacgccgccatcttccagcaagcttttcagctcggcttcatcaagcagctggaagccctgtgccgcactaccggagcgaacccattcggtcagcgtcagttcaatcgggttttccatgctcaatggtacaaccggtaagctccccaggcttttacgcagtaatgccagcgtatcttccgcttttttggcactggcgcagtccaccataatcaaaccgttaaccgtgtcgatccacatcattgtctggctaaaacggctgaaagcacgcggcagcagagagtgcagcacttcgtctttcaggctatctttttcggttttcttcagcttacgcgcctgttccgcttccagtttggcgattttcgcttccagcgcctgtttaatcaccggagacgggaggattttttcttctttgcgcgcgcagataacaatttgaccattggcaacgtgcgttaacgcatcgctgtggcttcccatcggaggaacccagcccatcttcgccatgtcctggctgccgcatggggtaaatgccatgctggctagctgtttttccatctcttctgcacgcaggctaatctcgcggctaagacggtaaaccattaaatttttgaaccacagcatgataatttccacggccttgtcgttaaatttagcgggcatgataacgaattgtcggcggccttgcattgccaatccggttgtccgtctctacgctattgatattgaaaaaaataaggagagtaccgtgcgtataggtatcgatttaggcggcaccaaaactgaagtgattgcactgggcgatgcaggggagcagttgtaccgccatcgtctgcccacgccgcgtgatgattaccggcagactattgaaacgatcgccacgttggttgatatggcggagcaggcgacggggcagcgcggaacggtaggtatgggcattcctggcagtattagcccttacaccggtgtggtgaagaatgccaatagtacctggctcaacggtcagccattcgataaagacttaagcgcgaggttgcagcgggaagtgcggctggcaaatgacgctaactgtctggcggttagtgaagcagtagatggcgcggcagcgggagcgcagacggtatttgccgtgattatcggcacgggatgcggcgcgggcgtggcattcaatgggcgggcgcatatcggcggcaatggcacggcaggtgagtggggacacaatccgctaccgtggatggacgaagacgaactgcgttatcgcgaggaagtcccttgttattgcggtaaacaaggttgtattgaaacctttattagcggcacgggattcgcgatggattatcgtcgtttgagcggacatgcgctgaaaggcagtgaaattatccgcctggttgaagaaagcgatccggtagcggaactggcattgcgtcgctacgagctgcggctggcaaaaagcctggcacatgtcgtgaatattctcgatccggatgtgattgtcctggggggcgggatgagcaatgtagaccgtttatatcaaacggttgggcagttgattaaacaatttgtcttcggcggcgaatgtgaaacgccggtgcgtaaggcgaagcacggtgattccagcggcgtacgcggcgctgcgtggttatggccacaagagtaaaaaacgtaggcaattggcgcatcatgcctgatgcgacgcttgccgcgtcttatcaggcctacaaaaggtgccagaaccgtaggccggataaggcgttcacgccgcatccggcaataagtgctccgatgcctgatgcgacgcttgccgcgtcttatcaggcctgcaaaatgtgccagaaccgcgtagggcggataaggcgttcacgccgcatccggcaataagtaatgagcaccgagactataacttaccccagtggtttcgccagcaccggagtatccgccgcttgctggcgcttatagcgaccatacagcagcaagctgctcatcgcagcaaagctaagcagggcggcaggcagcgccacgtaattatatgccagccccagcgtcagcatcatacctccgcaatatgcgccgacggcgctaccgaggttaaacgctatttgcccacctgcggcacctaataactctccgcctttggcgttttgtagtaacaatatttgtagcggtgcactaagggcaaataatcccgcgcaacaaataaaagcaaaaataaggctcgttgttttcatgccgccgcagaaaaagagcatcagcagtgccagtacaattataaagtcagtcactgctgcaatgcgcagtggactataacgtccactaatcctgccacttagcatatttcccagcaccatccctagcccaactaacatcataataaaggtcatcgccgtttcgctaaaaccggaaataaacatcatgtatggctttacgtagctgaaccaggcaaacacacctgcgttgccaaacatcgtggcggcgaaaattaaccacggggccgggctgcgcaaaaagtgaaattgttcgcgcagatttcctttcgcctcgtcgcgaatatctggcacccaaaaatagacgcttgccatcaccgcaatattaaaaacagcgatcaataaaaaggtgtaacgccagctaaattcctgacttaaatacgttcccagcggaatgcccagcaaattggcgactgtcatcccggaaaccatccccgccacggcggcggtgacttttccgggtttgataattttacttaacacgatcgctccgacgccaaaaaatgcgccatgcggaaagccggataccagccgaccaatggcgagcatcaggtaagagctagagagcgtgaacatggcgttgccaatgacgcacaacgccaccagaaacaacaagatatgtttgagactgtagcggctggaaaagagtgcgatgattggcgcaccgaccaccacccccagtgcataatagctgatcatatgcccggcggcaggaatgctaattcctacgttatgcgccagctccgtgagcacgcccataatgccaaattcggccatccccaaaccaaacgtgcccagagccaaagataaaatgacttttttcataccaccatcacaaccaccagaacggctaccaatcaccgtagccaataaagtgatagcttgcaggataacgaccagcaaggccaagagataattcgcccctctgtattcattatcctgctgaatagttatttcactgcaaacgtactttccagtttgctgtagcccaggccgttgatctttttcactttgatctgcaccggaatacgctctttcatcgcttctacgtggctaatcacaccgatggttttgccactggcgttcagggcatccagcgcatcaagggcggtatccagcgtttcgctatccagcgtgccaaaaccttcatcaaggaacaggctgtcaatacgtgttttatggctgaccagatcgctaagcgccagcgccagcgccagactaacgaggaaactttcgccgccggaaagggtacgggtatcgcgtaccgcatctgcctgccaggtatcaacaacctcgacttccagcgcctcgctggctttgcgctgtaacagatagcgcccgtgcagccgggtaagttgctgattagcgagatggactaaattatccagcgtcagcccctgggcaaacttgcggaatttatcgccctctttggaacctattaggctattcagatatccccagtcctcaacctgctgcgtcatttgagcaatttgctgcattaaggtttgttgttgctgacggttatctgcatcctgcttcagctgctggcgaatctcgccttgactcgtggtgttttcacgcaacttttggtgagtttgcgctaactcttgctgaatctgctccaccgtcacagtgagagccaacccgtcgtcaggtcggtgttgttgatgctgtgccagcgtttctgctgtctgagtgaccagagtttgcgcctgacggcgctggttttccagattctgcttgagctgttccagctgcgttagtgtttgttcatccattagcgccgcaaggaacgcctgctgatcgtcaaagacgctggcctgtagcgcggtgtcaaactgcgcctgggctttttgcagactttgcgccgccagaacatcctgttgctgtaacgtctgctgctggctgtgtaatgcgagacattgttcatgtacctgccgccagttttccaataccacagtttcttcgcagtgcgggagttcatcactttgcggcaacgtttccagaatcggcgtcagctgctgaatacggttttgcagcgcggttaattcgttctggcgttgctgccagctctgcgcttcttgctgacgtgtcgccaaccagctctcttcttcatcttcctgtggcaatgtcagtgcataacccgtcaatgtcgttaaaagtagttgctggcgttgttcaatttgctgttgatactggataatttgctgattatgcgcggcaatctgcccttgtaattcatgccgttggctgagtaaccgcagctggcgttcgtgctcatcttgtgcatccagccacggttgaatatcgtccagtggctgcaaggtgatattgaggctggccgtgacggcttgccattgttgagtaagtgcttgctcatcttgtcggaggctttgcgcttcgttttcatcacgctgaagctgctttgttatggcgtccagttgcccacgtagcgtcgcaccttcttcaccgagctttttaacttcgttttccagcgccagtaatcgagactgattaacgccaggctccagcgcctgatacgcctcgaccgccgggtggctggtggaaccacaaagtgggcaaggctgacccgcctgtaactgtgcacgttgagcttccagcgttttgatgcgcgcttcctgctcgcaaatggttttcacatcggcaagttgctgcgtcttttctttataacgctggcgcatttcgttaagtgcggcgttacgttgcgtctgttcttgcgtgacattctggatagcgacctgtaactgcgccagacgtttttgttggggaacaatctgtccatgcagcgcgaccaggtgctgacgcagtgggcgttgctcagcatgttgcgccagggcggtagcaacttcatcggcggttaacgtcaacgtgatcgccgcaagcgcattaagtttttgctcagcatgggttaactgttgctgccattgccgcagatgctcgcgatcgctggtttgttgggagaactgcgcacgccaacccgccggttcgttgttccactgacggaagcggtcgtgttcctgtaaccaggtattcaggctttgttgctgctgctgtaattctgcactctgcttcgccgcgtggtggcgaatgctcgcgcgaagcgccattgtgctctgtaagcgagtatttacttcttcaatctgctggcgaatatgcgccagcgccgcgctgtgttctgcgatgcgttcccagtgtggacgaagatttcgtgccggttgtgccagactaagcgccgccagttgaggttgcgctttttcttcttcggctaacgcctgttgcaaggcctgctgacggcggctggcttcttgctgcaattcgtcctgacgcgttaaccagtttaggctttgttgttcttgctgctgcgcggtaattaactgtttttcttcgtcagtaagtacctgcaaactcgctgtcaggctttgcacttgttccggcgtgagcaacgtgacgccgctggcctgcgcttgcagcttctccagctctgtgcgggcgcttttgtgctgctcaaaaaccatcgcgctgatttgcccgtagatttcagtgccggttaactcctcgagcaattccgcgcgttctttgggtttggcattcaggaaggcagcaaattgcccctggctaagcagcatgctacgggtgaagcgcccgtaatccagcccggttaacgtcgctgtcagttccagcttatctttcactttgtcggcgagaattttgccgtcggcgcagcgcgccagctctacgcgtggcacctgcaaattaccgtcgggttggttacgcgcccgattctggctccagaatgcacggtacgcttcacctttcacttcaaactccacctccgccagacattcggcggtatcgcgggtcatgagatcattttggctttgactaacgttagagagacgcggagtttcgtgatacagcgccagacaaatggcgtccagcagggtggttttccccgcacctgttgggccggtaatagcaaacagcccgttgctggcgaacggctcgcgggtgaaatcaatcttccattcgccttttaaactgttcaggtttttcaggcgcaggctgagaattttcatgcttcgtgttctccggcgagggtatgcaacgtcgtggtgaaaagatgctgcagacgttgctgctggctttcatccagttcttccagtgccagacggcgattgaacacctcttcgacgctgagttcgctgagggtttcacgctgttggctggctaacacacgctcgcgctgttcacgactccgacgtaccagcaatacttcgacaggcaaactttcggttaatgcctggattttgcgctgaatatcatgcagatactcatcagtagtgatttcgatatccagccagacaggtggctcctggcttacatcgcgccactgttccagctgtgcggtaatgctcgccagatcgcctttcagcactgccatgggttgcgttaccggtacgttcaggttttccacgctctctaatttgccgttactaaatgtcaccagatggacatatttactcttaccgcattcatcaaaactcagtggaatgggggagccgcaatagcgaacatgttccatgccgccaataatctgtgcgcggtgaatatgcccgagcgcgatgtagtcggctggtggaaagttttgtgccggaaacgcgtccagcgtgccaatataaatgtcacgcacggcgtcacttttactggcccccacggtcgttaaatgtcccgtggcgatgatgggcagaggctgatcgccgcgcagtttgcaggcatcggcatagtgttgttggtaataatcggtaatcgctgccagtaaatgctgctgtttttcaataccgttaagccccgcctggctggtaataatgtcacgcggacgtaaaaacggaatggggcacagcactgcgcctggcgtcccgtcgcgacgaggcaagatttgcggcgcatgtccggcgctggcgaccacggtagtattgaggaacgccatgatatcgcggctttcattcagcgtggcgacgctgtcatggtttcctgccagtaccaccagatgacagccagtttgctgtaaattgacaacaaaacggttgtataacgtgcgggcgtaactgggcgggctgccggtatcgaaaacatcaccggcaacaataatcgcatccacctgatgggtttgtgctgtctccagcagccagtcaagaaaagcctgatgttcagcttcgcggcttttactgtagaagttctggccgagatgccagtcactggtgtgaaggatgcgcataacggttccctggcgaaaaagcatgggcgcgattatacccaaacagatgtgccatttgcttttttctgcgccacggaaatcaataacctgaagatatgtgcgacgagcttttcataaatctgtcataaatctgacgcataatgacgtcgcattaatgatcgcaacctatttattacaacagggcaaatcatggcgagacgtattctggtcgtagaagatgaagctccaattcgcgaaatggtctgcttcgtgctcgaacaaaatggctttcagccggtcgaagcggaagattatgacagtgctgtgaatcaactgaatgaaccctggccggatttaattctcctcgactggatgttacctggcggctccggtatccagttcatcaaacacctcaagcgcgagagcatgacccgggatattccagtggtgatgttgaccgccagaggggaagaagaagatcgcgtgcgcggccttgaaaccggcgcggatgactatatcaccaagccgtttagcccgaaggagctggtggcgcgaatcaaagcggtaatgcgccgtattagcccaatggcggtggaagaggtgattgagatgcagggattaagtctcgacccgacatctcaccgagtgatggcgggcgaagagccgctggagatggggccgacagaatttaaactgctgcacttttttatgacgcatcctgagcgcgtgtacagccgcgagcagctgttaaaccacgtctggggaactaacgtgtatgtggaagaccgcacggtcgatgtccacattcgtcgcctgcgtaaagcactggagcccggcgggcatgaccgcatggtgcagaccgtgcgcggtacaggatatcgttttagtacccgcttttaacgccttgctcatcggacgcagagcagggcttatgatttcttaactggagtatcttacgtgctggaacggctgagctggaaaaggctggtgctggagctgctactttgctgcctcccggctttcatcctgggtgcattttttggttacctgccctggtttttgctggcaagcgtaacaggactgcttatctggcatttctggaatttattgcgccttagttggtggctgtgggtggatcgcagtatgaccccgccaccggggcgtggtagctgggaaccgctactatacggcttacaccagatgcagctgcgaaataaaaaacgccgccgtgaactgggcaatctgattaaacgctttcgtagcggcgcggagagcctgcccgacgcggtggtgctgaccacggaagagggcggtattttctggtgtaacggtctggcgcaacaaattcttggtttgcgctggccggaagataacgggcagaacatccttaacctactgcgttacccggagtttacgcaatatctgaaaacgcgtgatttttctcgcccgctcaatctggtgctcaacaccgggcggcatctggaaattcgcgtcatgccttatacccacaaacagttgctgatggtggcgcgtgatgtcacgcaaatgcatcaactggaaggggcgcggcgtaacttttttgccaacgtgagccatgagttacgtacgccattgaccgtgttacagggttacctggagatgatgaatgagcagccgctggaaggcgcggtacgcgaaaaagcgttgcacaccatgcgcgagcagacccagcggatggaaggactggtgaagcaattgctgacgctgagcaaaatagaagccgcaccgacgcatttgctcaatgaaaaggttgatgtgccgatgatgctgcgcgttgttgagcgcgaggctcagactctgagtcagaaaaaacagacatttacctttgagatagataacggcctcaaggtgtctggcaacgaagatcagctacgcagtgcgattagcaacctggtctataacgccgtgaatcatacgccggaaggcacgcatatcaccgtacgctggcagcgagtgccgcacggtgccgaatttagcgttgaagataacggaccgggcattgcaccggagcatattccgcgcctgaccgagcgtttttatcgcgttgataaagcgcgttcccggcaaaccggcggtagcggattagggttagcgatcgtgaaacatgctgtgaatcatcacgaaagtcgcctgaatattgagagtacagtaggaaaaggaacacgtttcagttttgttatcccggaacgtttaattgccaaaaacagcgattaatccgcctttgtcatcttttattgccataagccagtcgatgctggcttattttctttgcagtcaaaatacgggcgttagattttacaacgattggtgattttttgttcgcatgattagccatgtctttttcacggaaatagtgttttatactggttggtgatttcttatcgctatatacctctggtttttagatccctccttgctttaaaacgttataagcgtttaaattgcgcttcaggtgctgtcatactgactgcattaacgcggtaaatcgaaaaactattcttcgccgcgcctggttgggagtatttcccgctaaaattgtttaaatataccgctgtatcatccccagggattggcacaaaaatttaacgttacaacaccacatccacaggcagtatgatttatgacccatcaattaagaagccgcgatatcatcgctctgggctttatgacatttgcgttgttcgtcggcgcaggtaacattattttccctccaatggtcggcttacaggcaggcgaacacgtctggactgcggcattcggcttcctcattactgccgttggcctgccggtattaacggtagtggcgctggcaaaagttggcggcggtgttgacagcctcagcacgccaatcggtaaagtcgctggcgtactgctggcaacggtttgttacctggcggtggggccgcttttcgctacgccgcgtacagctaccgtttcctttgaagtggggattgcgccgctgacgggtgattccgcgctgccgctgtttatctacagcctggtctatttcgctatcgttattctggttagcctctatccgggcaagctgctggataccgtgggcaacttccttgcgccgctgaaaattatcgcgctggtcatcctgtctgttgccgctattgtctggccggcgggttctatcagcacggcgactgaggcttatcaaaacgctgcgttttctaacggcttcgttaacggctatctgaccatggatacgctgggcgcaatggtgtttggtatcgttattgttaacgcggcgcgttctcgtggcgttaccgaagcgcgtctgctgacccgttataccgtctgggctggcctgatggcgggtgttggtctgactctgctgtacctggcgctgttccgtctggggagtgacagcgcgagcctggtcgatcagtctgcaaacggcgctgctattctgcatgcttacgttcagcacacctttggcggcggcggtagcttcctgctggcggcgttaatcttcatcgcctgcctggtaacggcagttggcctgacctgtgcttgtgcagaattctttgcccagtacgtaccgctctcttatcgtacgctggtgtttatcctcggcggcttcagcatggtggtttctaacctcggcttaagccagctgatccagatctccgtaccggtgctgaccgctatttatccgccgtgtatcgcactggttgtattaagttttacacgcagttggtggcataatagctcccgcgtgattgctccgccgatgtttatcagcctgctttttggtattctcgacgggatcaaagcatctgcattcagcgatatcttaccgtcctgggcgcagcgtttaccgctggccgaacaaggtctggcgtggttaatgccaacagtggtgatggtggttctggccattatctgggatcgcgcggcaggtcgtcaggtgacctccagcgctcactaaatcactgaacatttgttttaaccacggggctgcgatgccccgtggttttttattgtgttgatgggttaggaattgatggaaagtaagaacaagctaaagcgtgggctaagtacccgccacatacgctttatggcactgggtagtgcaattggcaccgggctgttttacggtagcgcagacgccatcaaaatggccggtccgagcgtgttgttggcctatattatcggtggtatcgcggcgtatatcattatgcgtgcgctgggggaaatgagcgtacataacccggccgccagctctttcagccgttatgcgcaggaaaacctcggcccgctggcaggttacattaccggctggacctactgctttgaaatccttattgtcgccatcgccgatgtgaccgcttttggtatctatatgggtgtctggttcccgacggtgccgcactggatttgggtactgagcgtggtgctgatcatttgcgccgtaaacctgatgagcgtgaaggtattcggtgagctggaattctggttcagcttctttaaagtcgccaccatcatcatcatgattgtcgccggtttcggcatcatcatctgggggattggcaacggcgggcaaccgaccggtattcataacctgtggagcaacggcggcttcttcagtaacggctggcttggcatggtaatgagcttgcaaatggtgatgtttgcttacggtgggatcgaaattatcgggattaccgccggtgaagcgaaagatcctgagaaaagcataccgcgtgcgattaactccgtgccgatgcgtattctggtgttctacgtcggtacgctgttcgtcattatgtctatctacccgtggaatcaggttggcactgccggtagcccgttcgtgctgacgttccagcatatgggcattacctttgccgccagcattcttaactttgttgtgctgactgctagcctgagcgcaattaacagtgatgtatttggcgtaggccgtatgctccacggtatggcagagcagggcagcgcgccgaaaattttcagcaaaacgagccgtcgcggtattccgtgggttacggtgctggtgatgactaccgcgctgctgtttgcggtgtatctgaactacatcatgccggaaaacgtcttcctggtgatcgctagcctggcaaccttcgccacggtgtgggtgtggattatgatcctgctgagccaaattgccttccgtcgccgtttgccgccagaagaagttaaggcgctgaaatttaaagtgccgggtggggtagcaacgaccatcggcgggctgattttcctgctctttattatcgggttgattggttatcacccggatacgcgtatcagcctgtatgtcggtttcgcgtggattgttgtgctgttgattggctggatgtttaaacgccgccacgatcgtcagctggctgaaaaccagtaatccttgcgttctgtaagccggttcaggaggaaatcctgatccggctattccgaaagttatccgcccccgtcctcctcccccaaatatccttcagatgatgagtgatcctgcattaggctatggcaaggtgatcagattttcatcacaggggaattatgatgttaaatgcatggcacctgccggtgcccccatttgttaaacaaagcaaagatcaactgctcattacactgtggctgacgggcgaagacccaccgcagcgcattatgctgcgtacagaacacgataacgaagaaatgagtgtaccgatgcataagcagcgcagtcagccgcagcctggcgtcaccgcatggcgtgcggcgattgatctctccagcggacaaccccggcggcgttacagtttcaaactgctgtggcacgatcgccagcgttggtttacaccgcagggcttcagccgaatgccgccggcacgactggagcagtttgccgtcgatgtaccggatatcggcccacaatgggctgcggatcagattttttatcagatcttccctgatcgttttgcgcgtagtcttcctcgtgaagctgaacaggatcatgtctattaccatcatgcagccggacaagagatcatcttgcgtgactgggatgaaccggtcacggcgcaggcgggcggaagtacgttctatggcggcgatctggacgggataagcgaaaaactgccgtatctgaaaaagcttggcgtgacagcgctgtatctcaatccggtgtttaaagctcccagcgtacataaatacgataccgaggattatcgccatgtcgatccgcagtttggcggtgatggggcgttgctgcgtttgcgacacaatacgcagcagctgggaatgcggctggtgctggacggcgtgtttaaccacagtggcgattcccatgcctggtttgacaggcataatcgtggcacgggtggtgcttgtcacaaccccgaaagcccctggcgcgactggtacagctttagtgatgatggcacggcgctcgactggcttggctatgccagcttgccgaagctggattatcagagcgaaagtctggtgaatgaaatttatcgcggggaagacagtattgtccgccactggctgaaagcgccgtggaatatggacggctggcggctggatgtggtgcatatgctgggggaggcgggtggggcgcgcaataatatgcagcacgttgccgggatcaccgaagcggcgaaagaaacccagccggaagcgtatattgtcggcgaacattttggcgatgcacggcaatggttacaggccgatgtggaagatgccgccatgaactatcgtggcttcacattcccgttgtggggatttcttgccaataccgatatctcttacgatccgcagcaaattgatgcccaaacctgtatggcctggatggataattaccgcgcagggctttctcatcaacaacaattacgtatgtttaatcagctcgacagccacgatactgcgcgatttaaaacgctgctcggtcgggatattgcgcgcctgccgctggcggtggtctggctgttcacctggcctggtgtaccgtgcatttattacggtgatgaagtaggactggatggcaaaaacgatccgttttgccgtaaaccgttcccctggcaggtggaaaagcaggatacggcgttattcgcgctgtaccagcgaatgattgcgctgcgtaagaaaagtcaggcgctacgtcatggcggctgtcaggtgctgtatgcggaagataacgtggtggtatttgtccgcgtgctgaatcagcaacgtgtactggtggcaatcaaccgtggcgaggcctgtgaagtggtgctacccgcgagtccgtttctcaatgccgtgcaatggcaatgcaaagaagggcatgggcaactgactgacgggattctggctttgcctgccattagcgctacggtatggatgaactaacgttttataacgccttgcgactcgcctgcgccatcatccgcggataaaactgccagaagcgggtttcgagggcgtcataatgagcgtctaaatcgtaccaggagtcacgcagggcatccagacgtgggcggcggcttgccatgccgtttaacacgttctggatgaaatccatatcgcgatagcgcaccagccactgctcactccacaagtaattgttcagattgataaaacgtggcggactgtccggcaaaatcgtcatcacttgctcgcgggcataacagacaaattcctgtagcggaaagtccgggctcagctggctccagtggcgggaaagaaagtgatcccacatgacatccagcgtaataggcgcaacgcggcgcgtttcactacgaaaccactcccgtgcttcgcggacttccggcagattgtcagtcaatacgtcgatacgtcgatgcatatgaatgccagccacgacgtcgggcggaaaactttcttcaggatttccgcgtacgaaatcagccagtaaattgccggaaaggctgctttccgcgagatgggctaaatgcaggtgagctaaaaaattcatcgattatattctatccaaaagggggtaaaggttgcagggagagcgccccggcactagactacccgcctcttattttagtctgagtcagtgtcatgcgcgttaccgatttctcctttgaattgcccgaatccctgattgcccactatcccatgcctgaacgcagtagctgtcgtttactgagcctggacgggccgacgggcgcgctgacgcacggtactttcaccgatttacttgataagctcaaccccggcgatcttctggtttttaataatacccgcgtgatcccggcgcgcctgtttgggcgtaaagccagcggcggcaagattgaagtgctggttgaacggatgctcgacgacaaacgcattcttgcgcatattcgcgccagcaaagcgccaaaacctggcgcagaactgctgctgggcgatgacgaaagtattaacgcaacaatgaccgcgcgccacggcgcactgtttgaagtcgaatttaatgatgaacgcagcgtgctggatattctcaacagcatcggccatatgccgctgccgccgtatatcgaccgtccggacgaagacgctgaccgcgaactttatcaaaccgtttatagcgaaaaaccgggcgcggttgcagccccgaccgcaggtctgcattttgacgagcctttgctggaaaaattgcgcgccaaaggcgtggagatggcgtttgtgacgttgcacgttggtgcgggcaccttccagccggtgcgcgtcgacaccattgaagatcacatcatgcacagcgaatacgctgaagtaccgcaggatgtggtagacgcggtactggcggcgaaagcgcgcggtaaccgggtgattgcggttggcaccactagtgtacgtagcctggaaagcgcggctcaggcagcgaaaaacgatctcattgaaccgttcttcgacgatacccaaatctttatctatccgggcttccagtacaaagtggtcgatgcgctggtgacgaacttccacttgccagagagcacgctgattatgctggttagcgcctttgccggttatcaacacaccatgaacgcctataaagcagcggtagaagagaaatatcgcttttttagttacggtgatgcgatgtttatcacgtacaatccgcaggcaattaatgagcgcgtcggggagtaattccgcggcgctggtttaaaacgttggactgtttttctgacgtagtggagaaaaaatgaaatttgaactggacaccaccgacggtcgcgcacgccgtggccgcctggtctttgatcgtggcgtagtggaaacgccttgttttatgcctgttggcacctacggcaccgtaaaagggatgacgccggaagaagttgaagccactggcgcgcaaattatcctcggcaacaccttccacctgtggctgcgcccgggccaggaaatcatgaaactgcacggcgatctgcacgattttatgcagtggaaggggccgatcctcaccgactccggcggcttccaggtcttcagccttggcgatattcgtaaaatcaccgaacagggcgtgcacttccgtaacccgatcaacggcgatccgattttcctcgatcctgaaaaaagtatggagattcagtacgatcttggtagcgatatcgtcatgatctttgatgagtgtacgccgtatcctgctgactgggattacgcaaaacgctccatggagatgtctctgcgttgggcgaagcgtagccgtgagcgttttgacagtctcggaaacaaaaatgcgctgtttggtatcatccagggcagcgtttacgaagatttacgtgatatttctgttaaaggtctggtagatatcggttttgatggctacgctgtcggcggtctggctgtgggtgagccgaaagcagatatgcaccgcattctggagcatgtatgcccgcaaattccggcagacaaaccgcgttacctgatgggcgttggtaaaccagaagacctggttgaaggcgtacgtcgtggtatcgatatgtttgactgcgtaatgccaacccgcaacgcccgaaatggtcatttgttcgtgaccgatggcgtggtgaaaatccgcaatgcgaagtataagagcgatactggcccactcgatcctgagtgtgattgctacacctgtcgcaattatagtcgcgcttacttgcatcatcttgaccgttgcaacgaaatattaggcgcgcgactcaacaccattcataaccttcgttactaccagcgtttgatggcgggtttacgcaaggctattgaagagggtaaattagagagcttcgtaactgatttttaccagcgtcaggggcgagaagtaccacctttgaacgttgattaatattaataatgagggaaatttaatgagcttttttatttctgatgcggtagcggcaacgggtgcaccggcgcaaggtagcccgatgtctttgattttgatgctggtggtattcggtctgattttctatttcatgatcctgcgtccacagcagaagcgcaccaaagaacacaaaaagctgatggactccattgccaaaggtgatgaagttctgacgaacggtggcctggttggtcgcgtaaccaaagtagcggaaaacggctacattgctatcgcgctgaatgacaccactgaagtagttattaaacgtgacttcgtagctgccgtcctgccgaaaggcaccatgaaggcgctgtaattaaaatttttccctaagggaattgccgtgttaaaccgttatcctttgtggaagtacgtcatgctgatcgtggtgattgtcatcggtctgctgtatgcgcttcccaacctgtttggtgaggatccggctgttcagatcactggtgcgcgcggagtcgccgccagtgagcaaacgctgatccaggtccagaaaacgttacaagaagaaaaaataactgctaagtctgtggcactggaagagggcgctattcttgcgcgcttcgactccactgacacccagttgcgcgctcgtgaagcattaatgggcgttatgggtgacaaatacgtcgtggcgcttaaccttgccccggcaacgccgcgctggctggcagctattcacgctgagccgatgaagctcggccttgacctgcgtggcggcgttcacttcctgatggaagtggatatggacaccgcgcttggcaaactccaggaacaaaatatcgatagcctacgcagtgacctgcgcgaaaagggcatcccgtataccactgttcgtaaagaaaacaactacggcctgagcatcactttccgcgatgctaaagctcgtgatgaagccattgcgtatctgagcaagcgccatccggacctggtgattagcagccagggcagcaaccagctgcgtgcggtaatgagcgatgctcgtctgagtgaagcgcgtgaatatgcggtgcagcagaacattaatatcctgcgtaaccgtgtaaaccaacttggcgtggcggagccggtggttcagcgtcagggtgctgaccgtatcgttgttgaactgccaggtattcaggacactgcgcgtgcgaaagagattctgggtgcgacggcaacgctggaattccgtctggtaaacaccaacgttgaccaggccgctgcggcatccggtcgcgtaccgggcgactctgaagtgaaacagacccgcgaaggtcagccagttgtgctgtacaaacgcgtaattctgaccggtgaccatatcaccgactccacttccagccaggacgaatacaaccaaccgcaggttaacatcagcctcgatagcgctggtggtaacatcatgtctaacttcactaaggacaacatcggcaaaccgatggcaaccctgtttgtggagtacaaagacagcggtaagaaagatgcaaatggtcgtgcggttctggtgaaacaggaagaggtgattaacatcgccaacatccagtctcgtctgggtaacagcttccgtatcaccggcatcaacaacccgaacgaagcccgtcagctgagtctgctgctgcgtgccggtgcgttgatcgcgccgattcagattgttgaagaacgtaccattggcccaaccctgggtatgcagaacattgaacaggggctggaggcttgccttgccggtctgctggtttctattctgttcatgatcatcttctataagaagtttggtctgattgcgaccagtgctctgattgccaacttgatcttaatcgtcggcattatgagcctgttgccaggcgcaacgctgagtatgccaggtatcgcgggtatcgtcttaacccttgcggtggcggtcgatgcgaacgtactgatcaacgaacgtattaaagaagagttgagcaacggacgtactgttcaacaggcaattgatgaaggttatcgtggcgcattcagttctatcttcgatgcgaacatcaccacgctgattaaagtcatcatcctgtacgcagtgggtaccggggcaattaaagggttcgcgattactaccggtatcggtgtggcgacgagcatgtttaccgcgattgtcggtacgcgtgccatcgtaaacctgctatatggcggcaagcgcgtcaagaagctgagtatctgaggagtgcgatgtggcacaggaatatactgttgaacaactaaaccacggccgtaaagtctatgactttatgcgctgggactactgggctttcggcatctctggtctgctgttaatcgctgctatcgttattatgggcgtgcgcggctttaactgggggctggatttcaccggtggtacggttattgaaattacgctcgaaaaaccggctgaaattgacgtaatgcgtgatgcattgcaaaaagccggttttgaagagccgatgctgcaaaactttggtagcagccatgacatcatggtccgtatgccgcctgctgaaggcgaaaccggcggtcaggtgttgggcagccaggttctgaaggtgattaacgaatccaccaatcagaatgcagcagtgaagcgtattgagttcgtcggtccgagcgtgggggcagaccttgcgcaaaccggtgcgatggcgttgatggcagcgctgctgtctatcctcgtgtacgtaggtttccgctttgagtggcgactggcggcaggggtggttattgcgctggcgcacgacgttatcattacgctgggtattttgagcttattccatatcgagattgacctgaccattgtggcaagcttgatgagcgttatcggttacagccttaacgacagtatcgtggtaagcgaccgtattcgtgaaaacttccgcaagatccgtcgcggtacgccttacgaaatctttaacgtgtccttgacccagacgctgcaccgtaccttgatcacatccggtactaccttgatggttatcctgatgctgtacctcttcggtggtccggtactggaaggcttcagcctgaccatgcttatcggtgtttccatcggtactgcatcttccatctatgtggcatctgcgttggctctgaaactgggtatgaagcgcgaacacatgttgcagcagaaagtggaaaaagaaggggcggatcagccgagtattctgccgtaatcaagttcccgttgatgttgaaaatcccggtcagaagatcgggattttttttgatgtatggagattgcgaaaatccccgcatcttgggaaactgcgcgtaaccctacatttcatccaggtaacttttcatggctatcatcccaaaaaactatgcgcggttagaaagcggctatcgcgaaaaagcattaaaaatctatccgtgggtctgcggtcgctgttcccgcgagtttgtttattccaacctgcgtgaacttaccgttcaccacattgatcacgaccataccaataacccggaagatggcagtaactgggaattgttgtgtctctattgccacgatcatgagcatagcaaatataccgaagcggatcagtatggtacgaccgttatcgcaggggaagatgcgcagaaagatgtcggtgaagcgaagtacaacccattcgctgacctgaaagcgatgatgaacaagaagaagtgattaaaacgtaaaattgcctgatgcgctacgcttatcaggcctacgttatttcagcaatatattgaatttacgtgcttttgttggccggacaaagcgtttacgccgcatccggcatgaacaaagcacacgttgttaacaatcagaaatgccgggaataaatcccggcattttcataatcagaagttgtaacctactaccaggtaaccaccccagccggtagagcgaacgttgaagttgccgttgccgaagttcagttctgcatcgtcgttccactgaccaccgtcgtgccagtaacgagctacgacagagtagtgccagtgatcgtagttcagagccagaatatggctggaagcgatagagttattagtacgggtcttaataccgttgattgcgttaccgctgtcatcccctaaatcggaaccccagtcgaagttggtgaagccgatgtagctcagctgaccgccccacagatcggtaatcggcacaaagtatttaattttgaaacggtaaccgtcccactcgttttcgttcgctgcgccatagttctgccactggtatttcgcatagacgttcatggacaggctcatcggcaggccagtgtcgatatcggtacccagacccatgtaccaggtgctctggcgaccatctttattacgacccatgtcgtaaatgtagttgttcgcgaagtaccactctttgaacggaccgaagctaaggtcagtattggtcagcttgtcgatggagaaacgtggttcgatttccataaacagcggagaaccgtggttccagatacctttagcatcggagttaccgccgaagaataccggcgcatccgcataaccatagaagtcgaaccagtcttttttagcgaatgcttcgtactcaaggtaggtatcgttgcggatctgcggtccgaaacgggtgtgatagcttccgacaacgttaacgctctggtgccaccagtcggaaagatactgcggtttgtcgttttcagctgcgttgacagtaaaagagctagagagcgccagtaccgcaccggctgccagtaatgtttttttcatatgtatgccactgtttgaaaatcccttgcgggagtgaaaaaggcgcaaattgcgtttctaaatatttcgtatacagaggagcctattataaaaatcattgctcacaaaaatatgtttcgtttcacagttctatcatttacgtaatcgattgcgttcacgtttacacacattcgggcggggattgtactgactttcgcccttgttgcaaacttttactatcaatccaggtgatgtaagcagagtaacaaaatgacggggaaagatgttgcgggacgcacaaaatcgtcccgaaatacgtttactgcataacaggttgaatgtcgtggatacgtacaaagcctaactgatccacagaaatcccctttaactgtaacggaatatcaacatcgctgggggcgaggacgctggcaggggcattaatcaattgattctgcacattgatttcctgaaagttgtctattgttccctgaatttgcccatattcaacagttccgctgaatgcgggcaagggatcattgctctcaccctgaatacgtagtgtaagggtggtgccatctgcatcaggcgtaatattcaccaggctcatacgtaaagtaccgatctggctttccagtcttgccggtgttttcgctccaggcagaaggtaaaccccactgctggattttgcattcagcctgttttgctgagtgattttgactgtttcttgattgagttgcgtcatctcctggttcagcgtgctgacgctgtgtttcatctgtcgcacttcactttgctgcacacaggcgctaaggctgaacaggcttcccagcaggagcagtcgaaaaacgttagtattcataggtcgtccctttctcgtcgcaattagcctaatggtagagggtaaaagcagcgaaagcatcgatcctttatctcaaaagcgttgcgcctttgttgtatcgtcagttcagggtaaaatagatttccgttaaccacctggtcaggacgccgtatgcattgcccattctgtttcgccgtggacactaaggtaattgactctcgtctcgtgggcgagggtagttccgtacgccgccgtcggcagtgtctggtgtgtaatgaacgtttcaccacctttgaagtggcggagctggttatgccgcgtgttgtaaaaagcaacgacgtgcgtgaaccgtttaatgaagagaaattgcgtagcggaatgctgcgggcgctggaaaaacgtccggtgagttccgatgacgtcgaaatggcaatcaatcatattaaaagccagctgcgcgccaccggtgagcgcgaagtgccgagcaagatgattggcaatctggtgatggagcaattgaaaaagctcgataaagtcgcctatatccgttttgcctctgtctaccgcagtttcgaagatatcaaagaatttggcgaagagatcgcgcgcctggaggactaagccgtgcaggacgagtattacatggcgcgggcgctaaagctggcgcaacgaggacgttttaccacgcatcccaacccgaatgtcgggtgcgtcattgtcaaagatggcgaaattgtcggtgaaggttaccaccaacgtgcgggtgaaccacatgccgaagtacacgcgttgcgtatggcgggtgaaaaagccaaaggtgcgaccgcctatgtcacactcgaaccctgtagccatcatggtcgtacgccaccgtgctgtgacgcactcatcgccgctggcgtagcgcgcgtggttgccagcatgcaagatcctaacccgcaggtcgctgggcgtggactttaccgtctgcaacaggctggcattgacgtcagccacggcctgatgatgagtgaagccgagcaattgaataaaggctttctcaagcggatgcgcaccggctttccttatattcagttaaaacttggcgcaagccttgatggtcgcacggcgatggcgagcggcgaaagccagtggatcactagcccccaggcgcggcgtgatgtacaactactgcgcgcgcaaagtcatgccattttaaccagcagcgccacggtgctggcggatgatcctgccttaacggtgcgttggtctgaactggatgaacaaactcaggcgctctatccgcaacaaaatctccgtcagccgatacgtattgtgattgatagccaaaatcgcgtgacgccggtacatcgcattgtgcagcagcccggcgaaacctggttcgcgcgtacgcaggaagattctcgtgagtggccggaaacggtgcgtaccttgctgattccagagcataaaggtcatctggatctggttgtactgatgatgcaactgggtaaacagcaaattaacagcatctgggtggaagcggggccaacgctcgctggcgcattgctgcaggcgggtttagtcgatgagctgattgtctatatcgcacctaaactattaggcagcgacgcccgcggattatgcacgctgccagggcttgagaaattagccgacgccccccaatttaaattcaaagagatacgtcatgtaggcccggatgtttgcctgcatttagtgggtgcatgatctcccggctcgaaagggaagcagcgcacgaaatattatgctaaaatccgcccccctgcggggccatactcgaacccgaaggaagaaaatgaacattattgaagctaacgttgctaccccggacgctcgcgtcgccatcaccatcgcgcgtttcaacaactttatcaatgacagcctgctggaaggtgcaattgacgcactgaaacgtatcggtcaggtaaaagatgaaaacattaccgttgtttgggtgcctggtgcctatgagctgccgctggcggcgggtgcactggctaaaaccggtaaatacgacgcggtgattgcgctgggtacggttattcgtggtggcactgcccactttgaatatgtcgctggtggtgcaagcaacggcctggcgcatgttgcccaggacagcgaaattccggttgcttttggggttctgaccactgaaagcattgaacaagcgatcgaacgtgctggcaccaaagctggcaacaaaggtgcagaagctgcactgaccgcgcttgaaatgattaatgtattgaaagccatcaaggcctgaaattagtaaggggaaatccgtgaaacctgctgctcgtcgccgcgctcgtgagtgtgccgtccaggcgctctactcctggcagttgtcccagaacgacatcgctgatgttgaataccagttcctggctgaacaggatgtaaaagacgttgacgtcctgtacttccgtgagctgctggccggggtggcgactaataccgcatacctcgacggactgatgaagccatacctgtcccgcctgctggaagaactgggacaggtagaaaaagcagtactgcgcattgcgctgtacgaactgtctaaacgtagcgatgtgccatacaaagtggccattaacgaagcgatcgaactggcgaaaagcttcggcgcagaagacagccataagttcgtcaacggcgtactcgataaagcagcacctgtgattcgccctaacaaaaagtgatatccaggccggtagattcacggaagaccgttccatgatcgccggccttttcttttttacctgctgaggcataacgtatggcatgtggcgagttctccctgattgcccgttattttgaccgtgtaagaagttctcgtcttgatgtcgaactgggcatcggcgacgattgcgcacttctcaatatccccgagaaacagaccctggcgatcagcactgatacgctggtggcgggtaaccatttcctccctgatatcgatcctgctgatctggcttataaagcactggcggtgaacctaagcgatctggcagcgatgggggccgatccggcctggctgacgctggcattaaccttaccggacgtagacgaagcgtggcttgagtccttcagcgacagtttgtttgatcttctcaattattacgatatgcaactcattggcggcgataccacgcgtgggccattaagtatgacgttgggtatccacggctttgttccgatgggacgagccttaacgcgctctggggcgaaaccgggtgactggatctatgtgaccggtacaccgggcgatagcgccgccgggctggcgattttgcaaaaccgtttgcaggttgccgatgctaaagatgcggactacttgatcaaacgtcatctccgtccaagcccgcgtattttacaggggcaggcactgcgcgatctggcaaatagtgccatcgatctctctgacggtttgatttccgatctcgggcatatcgtgaaagccagcgactgcggcgcacgtattgacctggcattgctgccgttttctgatgcgctttctcgccatgttgaaccggaacaggcgctgcgctgggcgctctctggcggtgaagattacgagttgtgtttcactgtgccggaactgaaccgtggcgcgctggatgtggctctcggacacctgggcgtaccgtttacctgtatcgggcaaatgaccgccgatatcgaagggctttgttttattcgtgacggcgaacctgttacattagactggaaaggatatgaccattttgccacgccataaagatgtcgcgaaaagtcgcctgaagatgagtaatccgtggcatctacttgctgtcggattcggaagtggattaagcccgatcgttcctgggacgatgggcagcctggcagcgattccgttctggtatctgatgacctttttgccctggcagctctacagcctggtggtgatgctggggatctgtatcggcgtctatctttgtcatcaaacggcgaaagacatgggtgtgcacgatcatggcagcattgtctgggacgaatttattggtatgtggatcacgctcatggcgctgccgaccaatgactggcagtgggttgccgccgggtttgtgattttccgtattctggatatgtggaagccgtggccgatccgctggtttgatcgcaatgtgcatggcggcatggggatcatgatcgacgatattgtcgccggggtgatttccgcaggcatcctgtattttatcggtcatcactggccgctgggtattctgagctaattgtgcaccgatgcctgatgtgacgcttgtcacgtctcatcaggcctggactcttatttaaatcctacgacaggatgcggtttatacggcgtttccagttcggcaatctgttccggcttcaaagtgatatccaccgcgttcaatagctcatcaagctgttcttcgcggctagttccgataatcggtgcggcaatgcccggtttactcaacaaccaggccagcgcaacttgtgctcgtgtcgcccccagttcttcactgacgcctgttaaccgctctgcgatctgcgcgtcattttcatcgctttctttatagagatttttccccacctcatcagacaccagtcgtgcggtagtttctccccacggacgcgtcagacggccccttgccagcgggctccatggaattaccgccacgccctcctgataacacagtggtagcatctcgcgctcttcttcacgataaatcagattgtagtgatcctgcatactgacaaactgcgcccagccgtgctgtttttggagttccagtgcctgagcaaactggctagcgtgcatactactcgcgccgatataacgcgctttcccggcttttaccacgtcgttgagggcttccagcgtctcttcgatcggcgtgttgtaatcccagcgatgaatttgcaggatatcgacataatccatgccgagacgtcgcaggctgtcgtcgatagagcgcaaaatttgcgcacgggataatccttccggtaaatcaccaacgcgatggaacactttggtcgcaacgaccacgtcttcacgacgggcgaaatcccgcagtgcgcgaccgacgatctcttcgctgctgccgtcagaataactgttggcggtatcaaagaaatttatgccgccttccagtgcacgtttaattatgggacggctgctttcttccggcagtgtccatgcgtgattaccgcgatctggctcgccaaaggtcatacagccgaggcaaagtcgggaaacgcgaaggtcggtttttcctaaggggttgtattgcatgctgccactcctgctatactcgtcatacttcaagttgcatgtgctgcggctgcattcgttcaccccagtcacttacttatgtaagctcctggggcttcactcgtttgccgccttcctgcaactcgaattatttagagtctatgaataatttcttaagcatagcaggagtggagtagggattatgccagccaggccttgattttggcttccataccagcggcatcgaggccgagttcggcgcgcatttcttcctgagttccttgcggaataaagaagtccggcaggccaatgttcagcacgggtactggtttacgatgggccatcagcacttcgttcacgccgctgcctgcgccgcccataatggcgttttcttctacggtgaccagcgcttcatggctggcggccatttccagaattaacgcttcatcaagcggtttcacaaaacgcatatcgaccagcgtggcgttcaggctttcggcgactttcgccgcttctggcatcagcgtaccaaagttaaggatcgccagtttctcgccacgacgcttcacaatgcctttgccaattggtagtttttccagcggcgtcagttccacgccgaccgcgttgccacgcgggtagcgcaccgcactcgggccatcgttatagtgatagccggtatagagcatctggcgacattcgttttcatcgctcggggtcataatgaccatttccggtatgcagcgcaggtaagagagatcaaaagcaccctgatgggtttgaccgtcagcaccaacaatgcccgcgcggtcgatggcgaacaggaccggaagcttttgaatcgccacgtcatgcagcacctgatcataggcgcgttgcaggaaagtggagtaaatcgcgacaatgggtttgtacccaccaatcgccagacccgcagcaaaggtcaccgcgtgttgctcggcaattgccacgtcgaagtagcgatccgggaatttacgactaaactcgaccatgccggaaccttcacgcatcgccggagtaatcgccatcagcttgttgtctttcgctgccgtttcgcacaaccagtcgccaaagattttactatagctcggcaaaccgccgctacttttcggcaaacaaccgctggagggatcaaatttaggcacggcgtggaaagtgatcgggtctttttctgccggttcataaccacgaccttttttggtcatgatatgcaggaactgcgggcctttcaggtcgcgcatgttctttagcgtggtgataagccccagcacatcgtgaccgtccaccgggccgatgtagttaaagcccagctcttcaaacaacgtgccaggcactaccatgcctttaatatgttcttcggtgcgtttgagcagctctttaattggcggcacgccagagaaaacttttttcccgccttcgcgcagactagagtaaagcttaccggaaagcagctgtgccagatggttgttgagcgcgccgacattttcggaaatgctcatttcattgtcgttgagaatcaccagcatatcaggacggatatcgcccgcgtgattcatcgcttcaaacgccatgcctgcggtaatcgcgccatcgccaatgacacagacggtgcggcgatttttgccttctttttcggcagcaaccgcaataccaattccggcactgatggaggtactactatgcccgacgcttaatacgtcatattcgctttcgccgcgccacgggaacgggtgcagaccgcctttctgacggatggtgccgattttgtcgcggcgtccggtcaaaattttatgcggataagcctgatgccccacatcccaaatcaattggtcaaacggggtgttgtagacatagtgcagcgccacggtcagttcgaccgtgcccagcccggaggcgaagtgcccgctggaacggctcacgctgtcgagtaaatagcggcgcagttcgtcgcagagtttcggtaaactctctttcggcaacagtcgtaactcctgggtggagtcgaccagtgccagggtcgggtatttggcaatatcaaaactcatcaggggcctattaatacttattgtttatttattacgctggatgatgtagtccgctagcgcttccagtgcgctggtatcgagactctgttcagccagttgtttcaggctctgacgggcatcgtcgatcagatcccgggctttcttccgggcttgctcaagacccagaagtgcagggtaggtacttttaccaagttgctggtcggcaccctggcgttttcccaacgttgcagtatctcccaccacatccaggatgtcatcctgaacctggaaggcaaggccgatgctctctgcatacttgtcgagtaccggcagagcacgacgtcctttatctccggcgcttaatgcaccaaggcgaacggcggcgcgaatcaatgcgccggttttatgacgatgaatacgctcaagcgcgtccagaggtacgtgtttgccttccgcgtctaaatctaatgcctgaccaccgcacattccggcaataccactggcgctcgccagttcagaaatcatgctaattctgtcgcggtcgctcacttccggcatatcggcatcgcttaaaatgctgaacgccagcgtttgtaaagcgtcgccagcgagaatcgcgtttgcttcgccaaacttcacatggcaggttggcaaaccgcgacgcagatcgtcatcatccattgccggtaaatcatcatgaattaaactgtaagcgtggatacactcaacggcggcagcgggtgcgtccagcgtgtttgtgctaacgccgaacatatgaccggtggcataaaccaggaaaggtcgcaggcgcttaccacctaataatgcgccatactgcatggtttcgaccacgggagtgttctgaaagggcagtggggcgataaaacggctcagcgcctggttggcctgcttaacgcaggcttcgagttgctgcggaaagtccattactcattgtccggtgtaaaaggggttagagaggcgtcttcattgtcagacagcagaatttgtacgcgctgttcggcttgttgtaatttggcctgcccctgacgtgccagctgcacgccgcgttcgaactcgttcagcgcctcttccagcggcaggtcgccactttccagacgggttacaatctgttccagctcgctcagcgccttttcaaagctggcgggcgcctcatttttcttcggcataatgaatgtctgactctcaatatttttcgccccgtcatggtaacggactcagggcaaatagcaaataacgcgcaatggtaaggtgatgtgcacagcaaagcgatgttagtggtatacttccgcgcctggatgcagccgcaggtgtgggctgctgtatttttccctatacaagtcgcttaaggcttgccaacgaaccattgccgccatgaagtttatcattaaattgttcccggaaatcaccatcaaaagccaatctgtgcgcttgcgctttataaaaatccttaccgggaacattcgtaacgttttaaagcactatgatgagacgctcgctgtcgtccgccactgggataacatcgaagttcgcgcaaaagatgaaaaccagcgtctggctattcgcgacgctctgacccgtattccgggtatccaccatattctcgaagtcgaagacgtgccgtttaccgacatgcacgatattttcgagaaagcgttggttcagtatcgcgatcagctggaaggcaaaaccttctgcgtacgcgtgaagcgccgtggcaaacatgattttagcagcattgatgtggaacgttacgtcggcggcggtttaaatcagcatattgaatccgcgcgcgtgaagctgaccaatccggatgtgactgtccatctggaagtggaagacgatcgtctcctgctgattaaaggccgctacgaaggtattggcggtttcccgatcggcacccaggaagatgtgctgagcctcatttccggtggtttcgactccggtgtttccagttatatgttgatgcgtcgcggctgccgcgtgcattactgcttctttaacctcggcggcgcggcgcatgaaattggcgtgcgtcaggtggcgcattatctgtggaaccgctttggcagctcccaccgcgtgcgttttgtcgctattaatttcgaaccggtcgtcggggaaattctcgagaaaatcgacgacggtcagatgggcgttatcctcaaacgtatgatggtgcgtgccgcatctaaagtggctgaacgttacggcgtacaggcgctggtcaccggcgaagcgctcggccaggtgtccagccagacgctgaccaacctgcgcctgattgataacgtctccgacacgctgatcctgcgtccgctgatctcttacgacaaagagcacatcatcaacctggcccgccagattggcaccgaagactttgctcgcacgatgccggaatattgtggtgtgatctccaaaagcccgacggtgaaagcagttaaaagcaagattgaagcggaagaagagaagttcgacttcagcattctcgataaagtggttgaggaagcgaataacgttgatatccgcgaaatcgcccagcagaccgagcaggaagtggtggaagtggaaaccgtcaatggcttcggcccgaacgacgtgatcctcgatatccgttctatcgatgaacaggaagataagccactgaaagtcgaagggattgatgtggtttctctgccgttctataaactgagcaccaaatttggcgatctcgaccagaacaaaacctggctgctgtggtgtgagcgcggggtgatgagccgtctgcaggcgctctatctgcgcgagcagggctttaacaatgtgaaggtatatcgcccgtaatttgtggtttttacgtcgcatctggtcagatgcgacgtttgccgcatccgacattactcgtaataattataaatccctgccgccatcaccagttgacttgccacttcatgggctttttcacgcccaaccaacaggtcgataattttcagaccaaagtcgatagctgtacccggcccctggctggtcagcaattttacccgtgcatcccagacgacgcgcttgtccagccattgttcggcgggaattttgtctttcagcgtcgggaagccggtcatattaccaatcgggaagatatcgtgcggcaccagcacggtggctggcgcggcgcaaatagccgcgacgatacgcccggaacggtggaactgtttaacggtttcaaccagcagagtgctatcgcgaaaacactccgcgcctttaatgccaccaggcagcacgatcacgtcatattcgccatcagccacttcgaccagcggcgcatccgccagcagcttcacgccgcggctgcaggtaatcgccaggttaccatcgctggcgacgctggcagtggtgactttgataccgccgcgaaccagcagatcgatagtggtgacggcttcagtctcttcactaccaggggcgaggcaaaccagtgcgcttgcgctcatattcactctcctttctttttttaattaccaggggcgaggcaaaccagtgccgatgcgctcatattcactctcctttctttttaccatttcaaacaggcgggtgttttccggtacggcaatcccatgcgcgcgggcgcggcgtaagagaaaaccattgatatagtcgatttcagtgtggcgcagcgcgcggatatcctgcaacatgctgctgatattttccgctgtggcatcaatcacctgcatcacgtaatcacgcaaatcttctgcactagtatgatgcccttcgcgttcgatcaccgccgcgacttcttcgcatatctgcataatttcttgcggatgatgacgtaattcaccgttcgggcaattccagatggcagtcagtggattaatcacgcagttgactgccagcttgcgccacagctcggcgcgaatattgttatgccaggcaacgtcaggcaacacggtttgcaaaatatccgccagataactgtaatccccgtcctgttgccgtgccgggccaatatgcgtgataccgtttgccacatgaataatgacattgccgtcgcggcgggctgcatgggtggtggtgcccatcagtaatggctgctgaatgttttgcaactcttcgatggtgcccatgccgttgtgaattaacagtattggcgtagttacaggcagtgtggacgcgaggcttttgacggcatcggaaacctgccatgctttcagcgtcaccaggagcagatcgctggtggcgagaaaatcgggatcgttggcggtcaggctttcgttaaatatgctaccatctgtctcaaccagattcacgctacaataaggttgcggtacgcgcagccagccctgaacttcatgaccctgtttgcaaagtgctgtaagccataattgccctaaggcaccgcatcccaatacggtaattttcattgttcctcctcacccgcaaccactccgggtgttcaataaggctatcccttaattgtgcatgctgttgcgactatgcacaattaagggatacgtcctggtgcaggactgtcggttatttaactttgcgggtattatgcttcgcatcaaaaatgaagggagaggaaaagatgccatctttcgatattgtctctgaagttgatcttcaggaagcacgtaacgcggtcgataacgcgagccgcgaagtggagtcccgttttgacttccgtaacgttgaagccagttttgagctgaacgacgccagcaaaaccatcaaagtgttgagcgagtccgatttccaggtcaatcagttgctggatattctgcgtgccaagctgctgaagcgcggcattgaaggcagtagcctggatgtaccggagaatatcgttcatagcggtaaaacctggtttgtggaagcgaaactgaaacagggcattgagagcgcgacccagaagaaaatcgtcaagatgatcaaagacagcaaactgaaagtgcaggcgcaaattcagggcgatgaaatccgcgtaacgggcaaatctcgtgatgatttgcaggctgtcatggcgatggtacgtggtggcgatctcggtcagccgttccagttcaaaaacttccgcgattaatcgcgactatgtgcgttttgttcatgtcagatgcggcatgaacgcctgattcggcctacaaaggtttgtaattcagaaactttgtaggcctgataagcgtagcgcagcaggcaattcgccgcgttttttatgcctgacgaattgcctgttctatctcaaagcgattcgtcactttgctgtcgattttcacataagcactatgttcttcttctgcaatcaacacttctttgatgccttcagtttctagcaaacgcacttttaacgcctcgtttgcggcaatgttcgccgggatttcaatgcgcaaactgctgacatacggcggttctttcatggtactggcgactgtcagccacactgcggccagcattgcgccagcgagaaataccccctgaccgtcaaacatgccgttaatccagccgcccaggctaccgccaatcgccacgccaagaaactggctggtggagtaaacacccatcgccgtacctttgtaacctgctgggctctctttactgataagactgggcaggagggcttccatcaaattaaacgccacaaagaaaagctgcacgccgaccaccagttgccagaactgcgtttgcgcgttccacaacacaatttccgcaaccacgatcaacccgacgcagaagacaaagacttgcttcattttgcgcttaacttcagcgtagataatgaaaggcacgacgctgccaaaggcgattagcattgtcgccagatagaccttccagtgttcagccgccgggaaccctgcatcagccagttgtccgggcagggcaacaaacgtgctcatcagcaaaatatgcagacacataatgccaaagttgagtttcagcagccgcggttccgccagcactttactgaaactgcctttcaccattccggactcacgattaagtacgtgagtgctactgttgggcacaacccaaatggtcaacgcaatgccggtcgttgccagaatagcgatcatccagaacagcgcgtgcagcccaagtttgtgagtgatgatcgggccaagcaccatcgcaatggcaaaggtaatgccaaagctcacgccgataaacgccatcgctttggtgcggttttgttcgcgcgtgagatcggaaagcagcgccataacggcggcggcaattgctccagagccttgtagcgcccggcccagaataattccccagatggagtcggaaagcgcagcgataacgctaccggcggcaaacaccgccagcccaccgacaattaatggtttgcgaccaatgcggtcggaaagcaggccaaacggaatctgaaaaacggcctgagtcagaccataaataccaatggcaataccgattaatgcttcgctggcaccttgcagagccatgccgtacgtggtcagaaccggcagaaccataaacatgcccagcatgcgcaagctgaatacggtccctaaaccccaggtcgcgcgcctctcacctggcgtcattttataatcgttcattaccacctctgttttaaattcgcgactagtgtaaagcggcaaacgaatggggtaaacatgcggattttttagtaaatatttcgagagggatatgtttctaatgctaagaaaaaaggtgccgtagcacctttttaatagagaggttttgttaccacacagcagccagcagcgtatggctgtccggtaccataaaatcaacggacatcatcacgctgagggcagtgatggcgatgatagagaagccgaacagcttgcgcgcccagattctgtcatcagcaactttataaccgcgcagagccatacctaaccaccagacgctaaccgccgcggcgaccaccagatatttatacccagcgtaaccgccaagagagagcatcagcgtggcaacggcaaaggcgatgatatacagcgtgatgtgattcttcgccacgctaatgccttttaccactggcaataccggaatgtttgccgcctggtaatccttaaagcggaaaatggcgatggcataggagtgaggcatctgccacaggctgaagatagccagcaggatcgctgcgccgctatcgaactcaccggttaccgcacagtagccgatcaccggcggcgcagcgccggagaggctaccaatcaacgtgccgtagacagagtggcgtttcatgtacaggctataaacgccgacataaaccacaaagcccatcacccccagccagcaggccagcggattcgcgccaaaccacagcagcataaagccagcaatacccagcaacgtggcgtacaccaggctgacagcaggagagatcaggcctttcaccagcacccgattcttcgtcctttccatctttctgtcgatatccctgtcgatgtagttgttaaacacacaaccgctcgccacaaccagactcaccccaaccagcgtgtagataaacaggggataatcaatgctgcccttactggccagcaggaatcccccaatcacgctgatcaggttgccaaagatgatgcctggtttcgttacttgcaggtattgcttaaacatcataaccgccgctcttagtgcatcatcatgttgtagttgaggttccacataatccagatggagcctacaaccaggatagcgatgattagcacggtgaagacaaacgccgtcatgttccagccttcatcacttttggtattcatgtgcaggaagcacaccagatgcaccagaacctgtaccactgccattgccaggattgttcccagaattacggccggagaggcagctcctgtcatcaccatccagaacggaatcaccgtcagaatgatgctcaggataaagcctgtcatgtaggtttttacgctgccatgggacgcgccgctgtgatcggtagaatgactcattacatcgcccccatcagataaacaacagtgaacacacagatccaaaccacatccaggaagtgccagaacaggctcaggcacatgatgcgggtacggttagtgctggtcaggccgcgacgggcgatttgcaccatcagcaccgccatccagataagaccagaagtgacgtgcagaccgtgcgtgccgaccagcgcaaagaacgcactcaggaagccgctgcgatccggacccatgccgttaacaatcaggtgatggaattcatagatttccatcccgataaatccggcaccaaacaaccaggtcaacgccagccaggagataacctggcttttgttgtttttgtacatggcgatagccgccatgccgtaggtgatggagctgaacaacagcaagaaagtttcaaccagaacgaacggcagttcgaaaatgtccttacctgtcgggccgcctgcggtgccgttcaccagaacggcataggtagcaaacaagatagagaacagaatgcagtcgctcatcaggtagatccaaaatccgaagattttggttccgcctgcatcgtggtgcccgtgttcgtgcgcgtgggcagtcgcgtgcgtcaaagtatcagttgccatttttcagccctgccttagtaatctcatcgaaatgctggttttccagtttttcgatttctgccaccggcacgtagtaatccacgtcctcgtcgaagcttttcacgatccaggtgatgatcatgcctgcgaagccaacaatcgccagccaccagatatgccagatcatggcgaaaccgaagatggtggagaaagctgcaatgacgatacctgcaccgctgtttttcggcatatgaatttcttcatagtggtcaggctttttatacgcttcgcctttctctttcatttcccagaatgcatcacgttcgtgaacgtgcggcactacggcaaagttatagaacggaggcggggaagaggttgcccactccagcgtacggccaccccacgggtcgccagtcaggtcacggttctggtcgcggtcgcgaatagaaacgtacatctgaataacgaggcagagaatacccagcgcaatcagtactgcaccgctggctgcaatcatcagcatggtgtggaactgcgggtcaatctgctggctcaaacgacgggtcatgcccatgaagcccagcgcatacagtggcataaaggcaacgaagaagccgatgatccagaaccagaacgcgcgtttaccccaggtttcgttcagtttgaaaccgaacgctttaggccaccagtaggtcatccctgcgaagcagccgaagaccacgccgccgatgatcacgttatggaagtgcgcaatcaggaacaggctgttatgcagaacgaagtccgcgcccggtacggccagcagcacgccagtcatcccgcccacgctgaaggtgacgataaaaccgatggtccacagcatcgcagaatggaacacgatgcggccctgatacatggtgaacagccagttgaagatcttcaccccggtcgggatggcgataatcattgtggtgataccaaagaaggcgtttacgttcgcgcccgcacccatcgtaaagaagtggtgcagccaaacgatgaagctcagcacggtgatacagacggttgcccataccaggctggtataaccaaacagacgtttacggctgaaggttgccgcaatttcggagaacacaccgaaaacaggcaggatcaggatgtaaacttccgggtggccccaggcccaaatcaggttgatgtacatcatcatgttgccacccatatcgttggtaaagaaatgggtgcccagatagcgatccagggtcaacaacgcgacggtaaccgtcagaattgggaaggaagcaataatcagtacgttcgcgcacagacttgcccaggtaaatactggcatcttgaacatggtcatgcccggtgcgcgcatcttcagaatggtaacgaagaagttgataccggtaagcgtcgtacctataccggatagctggagactccatatccagtaatcgacaccgactcccggactgtactctattccgcttagcggtggataggccagccagccggtctgcgcaaattcgcccacgccgagagaaacgttaaccagaatcacaccaacaacggtaaaccagaagcttaagttgttgaggaacgggaacgcaacgtcacgcgcgccgatctgcagcggaaccaccaggttcatcagaccgataacgaaaggcatcgccacgaagaagatcataatcacgccgtgcgcggtaaagatctgatcgtagtggtgaggtggcaggaagcccgcttcgcccgcgctggcaagagcctgctggctacgcatcataatggcgtcagcaaaaccacgcagcaacatcacaatcgccacgatgatatacatgataccgaggcgtttatggtcgacggaggtcagccactctttccacaggtaggtccacttaccgaagtaagtgatcaggccaacgagcgccagacctcccaaaataatgccagcgatcgtaaccatgacgataggttcatggaacgggactgcatcaagacttaattttccgaacatctttattcttcctcaacccctttaatgggcggattccgcgtggctcatgtccatgccttccataccttcgtgtgcgctgtgctcaccttctggctgggtcatgtccatgctcttaccgtgagccataaacttgttaattacatcggcaaacaagtctggtttcacgttggagaaatattccacctggttgtattcgctaggcgcggccagtttttcgaacgcagccatgtcagacatggtgttcgggctctgcttcgcttttgcgacccactggtcgaatgcggcgcgatccggtgttgcaatagctttgaacttcatgccactgaagcccgggccgctgtagctggcggagataccgtcataagtgccgggttcgttggcgatcagatgcaggcgagtctgcataccggccatggcataaatctggctacccagacgcggaatgaagaaggagttcatcacggagttggaggtcactttgaagtacaccggagtgttcgccgggaaagcgatttcattcacggtagcaatgccctgttccgggtagatgaagaaccatttccagtccatggaaaccacttcgatggtaatgggcttctcgtcgtgtgccagcggcttgctaggctcaagagcgtgagtggttttccaggtcagtactgcaaggaagatgatgattaagataggtaccgtccagaccacagcttccactttattggagtgactccagttcgggctgtacttagcatctttattgctcgcacggtacttccaggcgaaaccaacagccatcaagattgcgggaataacgacaatcaacatcaggccaaatgccgtcagtatcagactacgttgctccagaccaatctgtcctttgggatctaacagcgcagaattacagccactgagcaatacagtgcctgcaaataaactcaaccatcccaaacttttattgtatttcctgagtctcatttaacgacctcaattccacgggatctggtggcgtttaaagtgtgtgggcattttacgggaaggttacattactgtaaacatgattaaattcctgttacttggatttggctgccaggtcacatatgttgcaaaacatatcaggttgattttaagaagctgttgcaaaagggcgttataacaaaaggggagtgctgaaggagtctgggcgggcaattggtataaccaatgtgaaataaaacaattatttaacaaataattatcattagagtgacaactgggtgatgagaaaataaagactcattagctgaatcgtgtaagaaaaatagaatttataaatggcgccaataatttccaaacgctaagccgcacaaaagaacaaatattaataagcgatactgatgtttatttagccgtaataattacggcgagtgattactacagctaaataatatttacagattacgtcagatgcgtttttcgtagcgccagataatccagcaaaccaccaagcacgacgccagaaagggcgactaaaaccccgacttccagcagagcaggcaggaaagagaagtgcgtcaaatccagcgcgtccatcgtcaatagcagtaaccacacggccaacaggctgacgcccgccgccagtgtccacatggcaaaggcataacctgccggatatgcggtacgggagataaagttgtcatttactcgtgtatattcaagcgtctggcggcaaaccagcagcaaaataagccctggtacggcagcggcgacggagaatagatagaatgtgctccagccgtgtgcttcaacaaaccaacccgccacggggccgacataaactcgccctacagcagaaagcgcactgagcagggcaaattgagtagcggaaaaactcttattacatagcgtcattaacagcgcgacaaaggcacttgtgcccatcccgccacagaggttttcgaaaaagacggctgcgcccatgctgtagagatgcttatcagtaatgctcagcagccagtaaccggcgttagacgcaccttgtaaaatgccgaaaatcagcagtgcccggaacagactcaggcgctgcatcaaaatcccaccgtacaatgcgccaacaatggtcgctagtaagccaagcgttttgttaaccacgcctacttcacccgcatcaaacccgacgccgcgaatcaaaaacgtggttgtcaggctcatggcgaatgcgtcgcccagcttatacagcacgataagaagcaaaataagccaggcattattgcgaccaaagaaatctcgcagaggtgcaacaaccgcttgttccagcgttttgggcacaggaatggtgtcggttggttctggtgcaagcaacgtcgcgataatacaggggatcaacagtgccgccattaaccagtacatgccctgccagcccagccatttatctgccagccacagggctaggccgccggaaaccagcatccctaaacggtaacccagcacgctgattgccgcgcccgcaccacgttcttctgccggaagcacatcggttttccacgcatcgaagactatatcctgggaagcagagcaaaaagcgatcaccactgccagcgccgccatccagcggagttgggtgcctggttcgagaaaacccatcgccgcaatggcgactaataacaggatttgcgtggcgagcagccaaccgcgccgccgcccaaaaaatggaggcgtgtagcggtccatcagcggactccagaggaatttaaaaacgtaagcctggcctaccagagagaagaaaccaatggttttgagatcgatattctcgaccgtcatccaggcctgtaaggtaccggatgtcagggcgagcggtagcccggaagcaaaacccaggatcagcaatatggcactacgcggctgttgaaaaatacgtaaatattgactggacatgggcgtctacaggcccggcttgcaccgggccagagggcagaaattaacgcgcgttctgcttgatgaattcgtggatgctggtgtcctgagacatatcagcgatggtatcggtcagcacactgttaaccgcatcggcgatatttttgttggaggcctggaacgcaccttcaacgttgtagctggcacgatagtttttggtcattttgttgccattctgcgcggtagcgatgatggcgatatccgctttggtcgcgatgttgtagcgcacgttgccctgggacacgtcagcatacagttggctaacgatgatttgcagattaaccgggccattcggaccaaccatgtaaccacgcgcggtcatctgtttttccagcacttcttgcagcaggaaacgcagatcgcgggaggcggtcagggtaacgatttgattatcgcgggtgacttttgccagcgcctgatcggtacgctgatcggcaccattaatgcttacggtgacgcccatcaggcttggatcctgctgtggcagtgtaatcgtcggggaaacttcaatagttgttggcggttttgcgcatcctgcaagcataaacagagcaactaacgggaagaggatttttttgaacatgttcgggctctcagagactcttaagcgtgtttggtaaaaattcccgccatcataacattgccaacggcgaggggaagtgggtaaggcatgtaaattcatcatgttgacgaaataatcgcccctggtaaaagaaacactgatgcgaggcctgtgtttcaatctttaaatcagtaaacttcatacgcttgacggaaaaaccaggacgaaacctaaatatttgttgttaagctgcaatggaaacggtaaaagcggctagtatttaaagggatggatgacatctcagcgttgtcggaggagatatttcatgatgatacgtgagcggatagaagaaaaattaagggcggcgttccaacccgtattcctcgaagtagtggatgaaagctatcgtcacaatgtcccagccggctctgaaagccattttaaagttgtgctggtcagcgatcgttttacgggtgaacgttttctgaatcgtcatcgaatgatttacagtactttagcggaggaactctctactaccgttcatgcgctggctctgcatacttacactattaaggagtgggaagggttgcaggacaccgtctttgcctctcctccctgtcgtggagcaggaagcatcgcgtaaaaacgcatttgcaactgtcggcgcttttccagtatgttgctaaagattttatgaaaaacggcctgcgggccgttttgttttgtctggattttgcgctttttgcccagcattcagacgaaaattgcccgggaattgtgaaaaaatacgcgacagcgcgcaataaccgttctcgactcataaaagtgatgccgctataatgccgcgtcctatttgaatgctttcgggatgattctggtaacagggaatgtgattgattataagaacatcccggttccgcgaagccaacaacctgtgcttgcggggtaagagttgaccgagcactgtgattttttgaggtaacaagatgcaagttagtgttgaaaccactcaaggccttggccgccgtgtaacgattactatcgctgctgacagcatcgagaccgctgttaaaagcgagctggtcaacgttgcgaaaaaagtacgtattgacggcttccgcaaaggcaaagtgccaatgaatatcgttgctcagcgttatggcgcgtctgtacgccaggacgttctgggtgacctgatgagccgtaacttcattgacgccatcattaaagaaaaaatcaatccggctggcgcaccgacttatgttccgggcgaatacaagctgggtgaagacttcacttactctgtagagtttgaagtttatccggaagttgaactgcagggtctggaagcgatcgaagttgaaaaaccgatcgttgaagtgaccgacgctgacgttgacggcatgctggatactctgcgtaaacagcaggcgacctggaaagaaaaagacggcgctgttgaagcagaagaccgcgtaaccatcgacttcaccggttctgtagacggcgaagagttcgaaggcggtaaagcgtctgatttcgtactggcgatgggccagggtcgtatgatcccgggctttgaagacggtatcaaaggccacaaagctggcgaagagttcaccatcgacgtgaccttcccggaagaataccacgcagaaaacctgaaaggtaaagcagcgaaattcgctatcaacctgaagaaagttgaagagcgtgaactgccggaactgactgcagaattcatcaaacgtttcggcgttgaagatggttccgtagaaggtctgcgcgctgaagtgcgtaaaaacatggagcgcgagctgaagagcgccatccgtaaccgcgttaagtctcaggcgatcgaaggtctggtaaaagctaacgacatcgacgtaccggctgcgctgatcgacagcgaaatcgacgttctgcgtcgccaggctgcacagcgtttcggtggcaacgaaaaacaagctctggaactgccgcgcgaactgttcgaagaacaggctaaacgccgcgtagttgttggcctgctgctgggcgaagttatccgcaccaacgagctgaaagctgacgaagagcgcgtgaaaggcctgatcgaagagatggcttctgcgtacgaagatccgaaagaagttatcgagttctacagcaaaaacaaagaactgatggacaacatgcgcaatgttgctctggaagaacaggctgttgaagctgtactggcgaaagcgaaagtgactgaaaaagaaaccactttcaacgagctgatgaaccagcaggcgtaatttacgcagcataacgcgctaaattcgcacaaaggcccgtcaccgccaggtggtgggcttttttttgtcatgaattttgcatggaaccgtgcgaaaagcctctttcggtgttagcgtaacaacaaaagattgttatgcttgaaatatggtgatgccgtacccataacacagggactagctgataatccgtccataaggttacaatcggtacagcaggttttttcaattttatccaggagacggaaatgagttacagcggcgaacgagataactttgcaccccatatggcgctggtgccgatggtcattgaacagaccagtcgcggtgagcgctcttttgatatctattctcgtctacttaaggaacgcgtcatttttctgactggccaggttgaagaccacatggctaacctgattgtggcgcagatgctgttcctggaagcggaaaacccagaaaaagatatctatctgtacattaactccccaggcggggtgatcactgccgggatgtctatctatgacaccatgcagtttatcaagcctgatgtcagcaccatctgtatgggccaggcggccagcatgggcgctttcttgctgaccgcaggggcaaaaggtaaacgtttttgcctgccgaatagccgcgtgatgattcaccaaccgttgggcggctaccagggccaggcgaccgatatcgaaattcatgcccgtgaaattctgaaagttaaagggcgcatgaatgaacttatggcgcttcatacgggtcaaagtttagaacagattgaacgtgataccgagcgcgatcgcttcctttccgcccctgaagcggtggaatacggtctggtcgatagcattctgacccatcgtaattgatgccagaggcgcaactgtgccgctatacttatccagggcggcacaacgctgtaagcggcttgcgcctgagaatggcatttgcgtcgtcgtgtgcggcacaaagaacaaagaagaggttttgacccatgacagataaacgcaaagatggcagtggcaaattgctgtattgctctttttgcggcaaaagccagcatgaagtgcgcaagctgattgccggtccatccgtgtatatctgcgacgaatgtgttgatttatgtaacgacatcattcgcgaagagattaaagaagttgcaccgcatcgtgaacgcagtgcgctaccgacgccgcatgaaattcgcaaccacctggacgattacgttatcggccaggaacaggcgaaaaaagtgctggcggtcgcggtatacaaccattacaaacgtctgcgcaacggcgataccagcaatggcgtcgagttgggcaaaagtaacattctgctgatcggtccgaccggttccggtaaaacgctgctggctgaaacgctggcgcgcctgctggatgttccgttcaccatggccgacgcgactacactgaccgaagccggttatgtgggtgaagacgttgaaaacatcattcagaagctgttgcagaaatgcgactacgatgtccagaaagcacagcgtggtattgtctacatcgatgaaatcgacaagatttctcgtaagagtgacaacccgtccattacccgagacgtttccggtgaaggcgtacagcaggcactgttgaaactgatcgaaggtacggtagctgctgttccaccgcaaggtgggcgtaaacatccgcagcaggaattcttgcaggttgatacctctaagatcctgtttatttgtggcggtgcgtttgccggtctggataaagtgatttcccaccgtgtagaaaccggctccggcattggttttggcgcgacggtaaaagcgaagtccgacaaagcaagcgaaggcgagctgctggcgcaggttgaaccggaagatctgatcaagtttggtcttatccctgagtttattggtcgtctgccggttgtcgcaacgttgaatgaactgagcgaagaagctctgattcagatcctcaaagagccgaaaaacgccctgaccaagcagtatcaggcgctgtttaatctggaaggcgtggatctggaattccgtgacgaggcgctggatgctatcgctaagaaagcgatggcgcgtaaaaccggtgcccgtggcctgcgttccatcgtagaagccgcactgctcgataccatgtacgatctgccgtccatggaagacgtcgaaaaagtggttatcgacgagagcgtaattgatggtcaaagcaaaccgttgctgatttatggcaagccggaagcgcaacaggcatctggtgaataattaaccattcccatacaattagttaaccaaaaaggggggattttatctcccctttaatttttcctctattctcggcgttgaatgtgggggaaacatccccatatactgacgtacatgttaatagatggcgtgaagcacagtcgtgtcatctgattacctggcggaaattaaactaagagagagctctatgaatcctgagcgttctgaacgcattgaaatccccgtattgccgctgcgcgatgtggtggtttatccgcacatggtcatccccttatttgtcgggcgggaaaaatctatccgttgtctggaagcggcgatggaccatgataaaaaaattatgctggtcgcgcagaaagaagctagtacggatgagccgggtgtaaacgatcttttcaccgtcgggaccgtggcctctatattgcagatgctgaaactgcctgacggcaccgtcaaagtgctggtcgaggggttacagcgcgcgcgtatttctgcgctctctgacaatggcgaacacttttctgcgaaggcggagtatctggagagcccgaccattgatgagcgggaacaggaagtgctggtgcgtactgcaatcagccagttcgaaggctacatcaagctgaacaaaaaaatcccaccagaagtgctgacgagcctgaatagcatcgacgatccggcgcgtctggcggataccattgctgcacatatgccgctgaaactggctgacaaacagtctgttctggagatgtccgacgttaacgaacgtctggaatatctgatggcaatgatggaaagcgaaatcgatctgctgcaggttgagaaacgcattcgcaaccgcgttaaaaagcagatggagaaatcccagcgtgagtactatctgaacgagcaaatgaaagctattcagaaagaactcggtgaaatggacgacgcgccggacgaaaacgaagccctgaagcgcaaaatcgacgcggcgaagatgccgaaagaggcaaaagagaaagcggaagcagagttgcagaagctgaaaatgatgtctccgatgagcgcagaagcgaccgtagtgcgtggttatatcgactggatggtacaggtgccgtggaatgcgcgtagcaaggtcaaaaaagacctgcgtcaggcgcaggaaatccttgataccgaccattatggtctggagcgcgtgaaagatcgaatccttgagtatcttgcggttcaaagccgtgtcaacaaaatcaagggaccgatcctctgcctggtagggccgccgggggtaggtaaaacctctcttggtcagtccattgccaaagccaccgggcgtaaatatgtccgtatggcgctgggcggcgtgcgtgatgaagcggaaatccgtggtcaccgccgtacttacatcggttctatgccgggtaaactgatccagaaaatggcgaaagtgggcgtgaaaaacccgctgttcctgctcgatgagatcgacaaaatgtcttctgacatgcgtggcgatccggcctctgcactgcttgaagtgctggatccagagcagaacgtagcgttcagcgaccactacctggaagtggattacgatctcagcgacgtgatgtttgtcgcgacgagcaactccatgaacattccggcaccgctgctggatcgtatggaagtgattcgcctctccggttataccgaagatgaaaaactgaacatcgccaaacgtcacctgctgccgaagcagattgaacgtaatgcactgaaaaaaggtgagctgaccgtcgacgatagcgccattatcggcattattcgttactacacccgtgaggcgggcgtgcgtggtctggagcgtgaaatctccaaactgtgtcgcaaagcggttaagcagttactgctcgataagagtttaaaacatatcgaaattaacggcgataacctgcatgactatctcggtgttcagcgtttcgactatggtcgcgcggataacgaaaaccgtgtcggtcaggtaaccggtctggcgtggacggaagtgggcggtgacttgctgaccattgaaaccgcatgtgttccgggtaaaggcaaactgacctataccggtagcctcggcgaagtgatgcaggagtccattcaggcggcgttaacggtggttcgtgcgcgtgcggaaaaactggggatcaaccctgatttttacgaaaaacgtgacatccacgtccacgtaccggaaggtgcgacgccgaaagatggtccgagtgccggtattgctatgtgcaccgcgctggtttcttgcctgaccggtaacccggttcgtgccgatgtggcaatgaccggtgagatcactctgcgtggtcaggtactgccgatcggtggtttgaaagaaaaactcctggcagcgcatcgcggcgggattaaaacagtgctaattccgttcgaaaataaacgcgatctggaagagattcctgacaacgtaattgccgatctggacattcatcctgtgaagcgcattgaggaagttctgactctggcgctgcaaaatgaaccgtctggtatgcaggttgtgactgcaaaataatgacctcgcgcaaaatgcactaataaaaacagggctggcaggctaattcgggcttgccagcctttttttgtctcgctaagttagatggcggatcgggcttgcccttattaaggggtgttgtaaggggatggctggcctgatataactgctgcgcgttcgtaccttgaaggattcaagtgcgatataaattataaagaggaagagaagagtgaataaatctcaattgatcgacaagattgctgcaggggctgatatctctaaagctgcggctggccgtgcgttagatgctattattgcttccgtaactgaatctctgaaagaaggggatgatgtagcactggtaggttttggtacttttgccgttaaagagcgtgctgcccgtactggccgcaacccgcagaccggtaaagagatcaccatcgctgctgctaaagtaccgagcttccgtgcaggtaaagcactgaaagacgcggtaaactaagcgttgtccccagtggggatgtgacgaagttcaagggcgcatctactgatgtgccttttttatttgtattcggtgactttctgcgtcttgtgggctgacaattgcccccgtttcttgtcacaataggcctttgcgcgcatcgatacgttgcgtgaggtacacagtcatctacagcggagtgttgttacaccatgatggacagcttacgcacggctgcaaacagtctcgtgctcaagattattttcggtatcattatcgtgagcttcatattgaccggcgtgagtggttacctgattggcggaggcaataactacgccgcaaaagtgaatgaccaggaaatcagccgtgggcaattcgagaacgccttcaacagcgagcgtaatcgcatgcagcaacagctgggcgatcaatactccgagctggcagcgaacgaaggctatatgaaaaccctgcgtcaacaggtgctgaatcgtctgatcgacgaggcgctgctggatcagtacgcacgtgagctgaaactgggtatcagcgatgagcaggttaaacaggcgattttcgcgaccccagccttccaggttgacggcaaatttgataacagccgctataacggtatcctcaaccagatggggatgaccgccgatcagtacgcccaggcgctgcgtaaccagctcactacccaacagctgattaacggcgttgccggtaccgattttatgctgaaaggtgaaaccgacgagctggcggcactggtcgcgcaacaacgcgtggtgcgtgaggcgactatcgatgttaacgcgctggcggcgaagcagcctgtgaccgaacaggagattgccagctactacgaacaaaacaaaaacaatttcatgacgccggaacaattccgcgtgagttacatcaagctggatgccgcaacgatgcagcaaccggttagcgatgcggatatccagagctactacgaccagcatcaggatcaattcacccagccgcagcgtacccgctacagcatcatccagaccaaaactgaagatgaagcgaaagcggtacttgatgagctgaataaaggcggtgattttgctgcattagccaaagaaaaatctgccgatattatctctgctcgtaacggcggcgatatgggttggttagaagatgccactatcccggacgaactgaaaaatgctggtctgaaagaaaaaggccaactgtctggtgtcatcaaatctagcgtcggtttcctgattgtacgtctggacgacattcagccagcgaaagtgaaaagcttagacgaagtacgtgacgacattgcggcgaaagtgaaacacgaaaaagccctcgatgcgtactacgcgctgcagcagaaagtgagcgatgcggcaagcaacgacaccgagtctctggccggtgcagagcaagctgccggcgttaaagccactcagacgggttggttcagcaaagataacctgccggaagagttgaacttcaagccggttgccgacgctatctttaacggcggtctggtaggtgaaaacggcgcgccgggcatcaactctgacatcatcaccgtagacggcgaccgcgcattcgtgctgcgcatcagcgagcacaaaccggaagcggtgaaaccgttggcagatgttcaggaacaagttaaggcattggttcagcacaacaaagctgaacaacaggcgaaagtggatgctgagaaactgctggttgatttgaaagccggcaaaggtgcggaagctatgcaggctgccggtctgaaatttggcgagccgaaaaccttaagccgttccggtcgtgacccgattagccaggcggcgtttgcactgccactgccagcgaaagacaaaccgagctacggtatggcgaccgatatgcaaggtaatgtggttctgctggcgctggatgaagtgaaacaaggtagtatgccggaagatcagaaaaaagcgatggtgcagggtatcacccagaacaacgcacaaatcgtctttgaagctctgatgagtaacctgcgtaaagaggcgaaaatcaaaattggcgatgcgctggaacagcaataatcctgaagccgcctcgcaaaaaaatgcgttgcagctgtaacaagaaaaggtcgctttcgcggccttttccatttctgaacattgccatttgtttactgttttcactgccgttaaggtgattccactgttaacaaacaaggagaaaacagtatgaaacacggaattaaagcactgctcattaccctgtccctggcctgtgccggaatgtctcatagcgcgctggcggcagcttctgtggcgaaaccgacggcggtagaaaccaaagcggaagctcctgcagcacaaagtaaagcagcagtaccggcgaaagccagtgacgaagaaggcacccgggtcagcattaataatgccagcgcggaagagctagcccgcgcgatgaatggcgttggcctgaagaaagcgcaggcgattgtcagttatcgcgaagagtacggtccgtttaaaactgtggaggatctaaagcaggtgccggggatgggcaatagcctggtggaacgtaatctggcggtattaaccctgtaattaatttgcatagtggcaattttttgccagactgaagaggtcataccagttatgacctctgtacttataacaacaacgtaaggttattgcgctatgcaaacacaaatcaaagttcgtggatatcatctcgacgtttaccagcacgtcaacaacgcccgctaccttgaatttctcgaagaagcccgctgggatgggttggaaaatagcgacagttttcagtggatgacggcccataacatcgccttcgtcgtggtcaatatcaatattaactatcgtcgcccagcggtattaagtgacctgttaactattaccagtcagttgcagcaattaaacggtaaaagcggcatcttaagccaggtcattacactggagccggaagggcaggtggtagcggatgcgcttattacgtttgtttgtattgatcttaaaacgcagaaagcattagctctggaaggggaattgcgcgaaaagctggagcagatggttaagtaaacgttttgtggtgccggatgctcaagccgcatccggcgacacccggaataattacctcaacccggttttctgcttcatcgctgccatcaccgtcggtttatcggccagataatgattcaaaccgttggcgcgtaaattacatgccgcacaatgaccgcaaccgtcgcctttaaagccgttatagcaggtcaacgtttcgttacggactaaatccagtttgccgtaataatctgccagcgcccaggtttccgctttatcaatccacatcagcggcgtttcaaaacgaatatctttcgccatgcccaaactgacggcatggtttagtgctttcacaaactcatcgcggcaatccgggtagccggagaaatccgtttcgcagacgccagtaattacggcttctgcttttacctgatacgcatatattgccgccagcgtcaggaacaaaatattacgccctgggacaaacgtattcgggataccatcggcttcaggttcataatcaggcaccggaatgctgtcacgcgtcaggctactgaccgccagctcgttgagcagggtgacatccagcaccttatgcgcgcgtgcccccagtttcagcgccagttcgcgtgccacgtcgatttctgcgcgatgccgctgaccgtaatcgaacgtcacgcaatggacttcatcatattgttgtaatgcctgcaccagacaggtggtggaatcctgacctccactgaacacaacgacagcacgtttcatagataatcctgcttgaacaataaaagcgttatggtaacgcctgcgattaacccggaccagctattcattggcttggcgcgggaagccaggcttcggtaaattcaaaccagccgcgcggtgtcagtcgcacaccgttcacgccgggaggggcactaatgcgatagtgatagttgaacagcggcgtcagcgtcgcatctgtcattaactggctaaaaaccgctttcagggcattaaatcggttttcttcatcaggcattatttgcacggcatccagtgtgctttgtagatgtgcgtatgctggagcgtcgaaaacatgtggccacagcggatcgcagcgcagccattgctccagagtatattccggtgcttcgccaattaatctgtcgcccatcatgaggtctgcgtgtgcctgtagggtcgtgtcgtcccagttttttgcgttatgaaaaataattgtgagttcacagccttccgctgccagtgtcgcctgtaggcgttctgccatggtatgaagttctatcggtaggtgataaaccagcgtcaaggttttcggtagtttgacttcatccggtacctgccaatgcggaatagtccagcctggcagtaatgcatgactggcggtgatcaggttttctccgacttctaacgtttgtaataaaccggattgatgaataatggagatcacttttcgcgcctgccagagggagagtcggggacttttgcgcaacgtcaaatagcaaaaacctaaactgatgccgctactgacctggctgacccgttgcagctcctccggtttgccgatggtgatttgcacgggatgccgacaactggttcccaaatctttttcgaaaagcggcggagttatccagtactcaaccgctttaagcagcggatgacgtaaatggtaataatcatggctttccaggcgcaccagctctgctgtgaattgtgttaagcgaaaaggacccgtgccgatcagtgggaattgcggatgcgccagatggctgcaatagctcgccagccggtgcgcaagccagtaatcagggcgatgtaaaaagaaggtcagacactgcggatgggtgacttcaatacgcttcacgctaataaataattgatccagtgctggcagttgtaacagcatcaataatcgctggtgtaagtgactggcttttactgcatcgccgttatgccagtgtagggtactacgaagataaaagtcccagcgtaacccgtcagtagaggtttcccagtgatgcgctaaatcgccaatcgggcgctgagtattattatcgaagcgggtcaggccggaaaatatctgcccggcgagatgctgctcggcacggccgggcaaaaagcctggttgtagcggttcgagcgggcgatagtagggaatacgcaacgtgggtgtatcgttttgccattgtccgcccataaacggctgtaacagagtgcgcagctcacctggggccagttgcgccagctccagcacatcttgctgctttccggtttccagtgcctgttccatcatcgcattgcgtaggctttccggcgtgaccagaaagcgtaattgtccgcgctttccgcgtccactctgcgcctgccactccagccatcccgcctcctgtgcctgacgcaacagcgtacgaacatggcgttcgctgcaaaaacagcgttcggccagttcgctgacggtgacggtttgcggctttccggcggaaggttgccacagacgttgatactggttaagacggttgagcaatcgcatataaacccggaacaatattatttaactattcactattacttccgtatatatcaggtgatactcaatcaccattaaccgtgtcacagagtggagaaagaaatggctcgtctggcagcatttgatatggatggcactttattgatgcccgaccatcatttaggtgagaaaaccctctctactttggcgcgactgcgtgaacgcgacattaccctcacttttgccacggggcgtcatgcgctggagatgcagcatattctcggggcgctaagcctggatgcgtatttgattaccggcaacggaacgcgcgtgcattctctggaaggtgaacttttacatcgtgatgatttacctgcggatgtcgcggagctggtgctgtatcagcaatgggatacccgagccagcatgcatatcttcaatgacgacggttggtttaccgggaaagagatccctgcgttgttgcaggcatttgtctatagcggttttcgttatcagataatcgatgtcaaaaaaatgccactcggcagcgtcaccaagatctgcttctgtggcgatcacgacgatcttacacgcttgcagatccagctatacgaagcattaggcgagcgtgcacatttgtgtttttccgccacggattgcctcgaagtgctgccggtgggctgcaataaaggcgctgcattgacggtgctgacccaacatttaggtttaagcttgcgcgattgcatggcctttggtgatgcgatgaacgatcgcgaaatgttagtcagcgtcggtagcggatttattatgggcaatgcgatgccgcaactgcgcgcggagctcccgcatttaccggtgattggacattgccgaaatcaggctgtctctcactatttgacgcactggctggactatccacatctaccttattcccccgaataacgagatcccttccagcaccgggcaattgcccggttttttttgcgttgaatttgtcattttgtgccgtggtgtttaaaccgcacagaataaattgtcgtgatttcacctttaaaataaaattaaaagagaaaaaaattctctgtggaagggctatgttagataaaattgaccgtaagctgctggccttactgcagcaggattgcaccctctctttgcaggcactggctgaagccgttaatctgacaaccaccccttgctggaagcgcctgaaacggctggaggacgacggtatccttatcggcaaagtcgccctgctggatccggaaaaaataggcctcggcctgaccgcttttgtgctgataaaaacgcaacatcacagcagcgaatggtattgccgctttgtcacggtggttaccgaaatgccagaagtgctggggttctggcgcatggctggtgaatacgattatctgatgcgcgtccaggttgccgacatgaaacgctacgacgagttttataagcgtctggtaaacagcgtgccggggctgagcgacgtcacttccagcttcgcgatggaacagattaaatacaccacttctttacccatcgaataaatatccagaatcaggtcaggacacaacgcgtgcgattatttgctcaattaagctggtatttccgtcgggaatggcgtcgctatctcggggctgtcgccttgcttgtcattatcgcgatgctgcaactggttccgccaaaagtggttggtattgttgtcgatggcgtgacagaacaacactttactaccgggcagatcctgatgtggatcgccaccatggtgctgattgccgttgtggtttatctcctgcgttacgtctggcgggtattgctgtttggtgcgtcttatcaactggctgttgaactgcgtgaagattattaccgtcagctaagccggcagcatcctgagttttacctgcgtcatcgcaccggtgacctcatggctcgtgcgaccaatgacgtcgatcgcgtcgtgtttgccgccggagaaggggtgctgacgctggtggatagtctggtgatgggctgcgctgtgttgattatgatgtctacgcaaattagctggcagttgaccttattttccctgttgccgatgccagtgatggcgatcatgattaagcgcaacggcgatgctttgcatgaacgctttaagctggcacaggcggcgttttccagtcttaatgaccgcacccaggaaagcctcaccagtatccgcatgatcaaagcctttggtctggaagatcgccagagcgcgttatttgccgcggatgccgaagataccggcaaaaaaaacatgcgggtggcgcgtattgatgctcgtttcgacccgaccatctatatcgcgattggtatggcgaacttgctggcgattggcggcggtagttggatggtggtgcagggcagtttaacgctgggccagctcaccagttttatgatgtatttaggtctgatgatttggccaatgctggcgctggcatggatgtttaacattgtggaacgtggtagtgctgcgtacagccgtattcgcgcgatgctggcggaagcgccggtggtgaacgatggtagcgaacccgtgccggaagggcgtggcgaactggatgtaaatattcaccagttcacgtatccgcagactgaccatcctgcgctggaaaacgtcaatttcgccctgaaacccggtcagatgctgggtatctgcgggccgactggttccggcaaaagtaccctgttgagcctcattcagcgtcatttcgacgtcagcgagggggatattcgctttcatgatattcctctgacgaagttacaactcgatagctggcgtagccgcctggcggtagttagccagacgccattccttttttctgacactgtggcgaataacatcgcgctgggttgcccgaatgccacccagcaagagattgagcatgtcgcgcggttagccagcgtacatgacgatattttgcgtctaccgcaaggttacgatacagaggtgggcgagcgcggtgtgatgctttccggcgggcaaaaacagcgtatctccattgctcgtgcgttattagtcaacgcggaaatcctcatccttgatgatgcgcttagcgcggtggacggacgcactgagcaccagatcctgcataacctgcgtcagtgggggcagggaagaacggtaatcatcagtgcccatcgcctttctgcactgacggaagccagtgaaattattgtgatgcagcacggacatatcgcccagcgtggcaatcatgatgtgctggcacaacaaagcggctggtatcgcgatatgtatcgctatcaacaactggaggcggcgctcgacgacgctccggaaaatcgcgaggaggccgtcgatgcgtaactaaaaatcgcgaggaggccgtcgatgcgtagttttagccaactgtggccgactctcaagcgcctgttagcgtacggtagcccgtggcgtaaaccgctggggattgcggtcctgatgatgtgggttgcggcggcggcagaagtcagtgggccgctgcttatcagctattttatcgacaatatggtagcgaaaaataacctgccgttgaaagtggttgcagggctggctgcggcgtatgttgggctgcaactgtttgccgccgggctacattacgcgcagagcctgctgtttaatcgggcggcagtaggcgtagtgcaacagttgcgtaccgacgtgatggatgctgcgttacgccagccattaagcgagtttgatacccaacccgtcgggcaggtgatttcccgcgtcactaatgacactgaagtgatccgcgatctctacgttaccgtagtggcaactgtcctgcgcagtgccgcgctggtgggcgcgatgctggtggcgatgttcagcctcgactggcgaatggcactggtggcgataatgattttcccggtggtgctggtggtaatggtgatataccagcgttacagcacgccgattgtccgtcgtgtgcgcgcctatttggcggatatcaacgacggctttaacgaaatcatcaatggcatgagcgttatccagcagtttcgtcagcaggcgcgatttggcgaacgtatgggggaggccagtcgtagtcactatatggcgaggatgcaaaccctgcgcctcgacggttttctgctgcgtccgctgctgagtctgtttagtagcctcattctttgtggcttgttgatgctgtttggcttctccgccagcggcaccattgaagtgggcgtgctgtatgcgtttatcagctatcttgggcgacttaacgaaccattaatcgaactgaccacgcaacaggcgatgctgcaacaggctgttgttgctggtgagcgcgtgtttgaactgatggacggaccgcgccagcaatatggcaatgatgatcgcccgttacagagtggcaccatcgaagtcgataacgtgagttttgcttatcgcgatgacaatctggtgctaaagaacattaatctctctgtgcctagccgcaattttgtggcgctggtcgggcataccggcagtggcaaaagcaccctcgccagtttattgatgggctattacccgctaacggaaggtgagattcgccttgatggtcgtccattaagtagcctaagtcacagcgcgctgcgccagggcgtggcaatggtgcagcaagatccggtggtgctggcggataccttcctcgccaacgtgacgctggggcgggatatctccgaagaacgcgtctggcaggcgctggaaaccgtgcaactggcggagctggcgcgtagcatgagcgacggtatttacacgccgctgggcgagcaggggaataatctcagtgttgggcaaaagcaactgctggcactggcgcgcgtgctggtcgagacgccgcaaatcctgatccttgatgaggcaaccgccagcattgactccggtactgaacaggcgattcaacatgctctggcggcggtgcgtgaacataccacgctggtagtgattgctcaccgcttaagcaccattgttgatgccgacaccattctggtgcttcatcgtgggcaagccgtggagcagggcactcaccagcaactgctggcggcccagggacgctactggcagatgtatcaactgcaacttgcgggcgaagagctggcagccagcgtgcgtgaagaggaaagtttgagcgcctgaatagcgcaatatttcatcgttggtgcaaaaatgtaacgcactgtgcactgtcatagtgcgttttcattttcaaacttcttaacttcctgctctctttctcgtttttcatttctggcacaccgcttgcaataccttcttcgtgtagcagaaccattaccgaattctgaccggaggggatctatgaagctggtgaccgtgataatcaaaccattcaagctggaagacgttcgtgaagcgttatcttccattggtattcagggcctgaccgtcaccgaagtgaaaggtttcgggcgtcagaaagggcatgccgagctgtaccggggggcggaatacagcgtcaatttcctgccaaaagtaaaaattgatgtggcgattgctgatgaccaactcgatgaagtgatcgatatcgtcagtaaggcggcttacaccggaaaaattggcgacggcaaaatcttcgtcgctgaattgcaacgcgtcattcgtattcgtaccggcgaagccgacgaagcggcgctgtaatctctggcacacagcaacaggaacgaaaaatgaagatagcgacgataaaaactgggcttgctagtctggcgatgcttccgggactggtaatggctgcacctgcggtggccgataaagccgacaatgcgtttatgatgatttgtactgcgctggtgctgtttatgactattccggggattgccctgttttacggtgggttgattcgcggcaaaaacgtgctgagcatgctgacgcaggtgacggtgacatttgcactggtctgtattctctgggtggtttacggttacagcctggcgtttggtgagggcaacaacttcttcggcaacattaactggttgatgctgaaaaacatcgaactgacggcggtgatgggcagcatttatcagtatatccacgtggcgtttcagggaagctttgcctgcattaccgtcggcttgatagttggggcgctggcggaacgaatccgcttcagtgctgtgttgattttcgtggtggtatggctgacgctctcttacattccgattgcgcatatggtgtggggcggtggtttgctggcttctcacggtgcgctggatttcgcgggtggcaccgtggtgcacattaacgccgcaatcgccggtctggtgggcgcgtatctgataggaaaacgcgtgggcttcggtaaagaggcgtttaaaccgcacaacctgccgatggtcttcaccgggactgccattctctatatcggttggtttggctttaacgccgggagtgcgggcacggcgaatgaaatcgcggcactggcatttgtgaatactgtggtcgcaacggcggcggcaattcttggctggatcttcggtgaatgggcgctgcgtggtaagcctagtctgctgggggcgtgttctggcgcgattgccggtctggtcggcgtgacgccagcctgcggctacattggggttggcggcgcgttgattatcggcgtggtagctggtctggcgggcttgtggggcgttaccatgctcaaacgcttgctgcgggtggatgatccctgcgatgtcttcggtgtgcacggcgtttgtggcattgtcggctgtatcatgaccgggatttttgccgccagcagcctgggcggcgtgggcttcgctgaaggtgtgacgatgggccatcagttgctggtacagctggaaagcatcgccattacgatcgtctggtccggtgttgtggcatttatcggctacaaattggcggatctgacggttggtctgcgtgtaccggaagagcaggagcgagaagggctggatgtcaacagccacggcgagaatgcctataacgcgtaacaagcactgcaaaaaacagccggacggttttcacctccggctatttttttaattgtgattacgcatcaccccttcctgaacggtgctggcaaccagtacgccgtcttgggtataaaactcaccgcgcacaaagccacgtgcgctggacgcgctggtgctctccacgctatacagcagccattcattcaaattaaacgggcgatggaaccacatggaatggtcaatggtggcaatctgaatccccggttcgagaaaaccgatgccgtgcggctgtagagctaccggcaggaagttaagatcagaagcgtaaccgagcagatactgatgaacgcgcaggtcatccggcacgctaccatttgcgcggatccacacctgacgatgtggttctgcgacgtgacctttcagtgggttatgaaactccaccggacggacttccagcggacgatcgcagatgaatttatctttcagcactggcggcagcaggtgcgccaggctttgggcgatttgcgtttcgctagggaggccatcaggcgctggcgcggacggcattgttttttgatgttcgaaacccgcttctggtgcctggaaagaggcagtcatataaaaaatcggtttgccgttttgaatagcagcaacccggcgggcgctgaagctgttaccgtcacgcagcgtttcgacatcataaataatcggcttcttactatcgccagggcgaagaaagtagctgtgaaagctatgtaccagccgctcttcagggacggtctcttttgcagcatacaaggcctgacccacgacctggccgccaaacacctggcgtaaacctaaatcttcactctggccgcgaaagagtccttcctcaattttttccagatttaacaatgtcagtaaattttttagcgcctgactcatataactctccagtaacaaagctgccgcagcaagccaaagtgagttgagtataacgcaaatttgctactggtccgatgggtgcaatggtctgaattacgggctaattacaggcagaaatgcgtgatgtgtgccacacttgttgacgttactattttgttaaccactcttccggcgaggaaagttagcccgctggtgcattgataataaggagaaatgaatgaaactcgtgcacatggccagtggtttagcggttgcgattgcgttggcggcttgcgcagataaaagcgcggatattcagacgccagcaccggctgcaaatacgtctattagtgcaacacaacaaccagctatccagcaaccgaatgtctccggtaccgtctggatccgtcagaaagtcgcactgccgcctgatgctgtgctgaccgtgacactttctgacgcgagcttagccgatgcaccgagtaaagtgctggcgcagaaagcggtgcgtactgaaggtaaacagagtccattcagctttgttctgagttttaacccggcagatgttcagccgaacgcgcgtattctgttgagtgcggcgattaccgtgaatgacaaactggtatttatcaccgataccgttcagccggtgatcaaccagggcggaactaaagccgacctgacattggtgccggtacagcaaaccgccgtgccggttcaggccagcggtggcgcaacgactaccgtacctagcactagtccaactcaggtgaatccgtctagcgcagttccagctcctacgcaatattaagcgacgttaaccctctccgcccggagagggttagtagttccagcgataacgctgcaagtcgatttgcccgcttccgcttaccatcacaccttctgccagtaatgcctgtcgctgacgctgtaaatccggtccggttaggctaattgtgccgtggcgattaaccacccggtgccagggtaaggtgctgccttcagggagacgctttaacacaccgcccacctggcgcgcggcgcgggggcttcccgccagtttcgccacatcaccgtaagtggtgacatagccttcgggaatagcggcgacgatttgccagacgcgttggggaaaactatcttctttttccatcttttcttcctgaggtaatttttcagcataatctggaaaaacgccgctgtgaagtcgcattgcgcaagaaaccagcatctggcacgcgatgggttgcaattagccggggcagcagtgataatgcgcctgcgcgttggttctcaacgctctcaatgggggctctgttggttctcccgcaacgctactctgtttaccaggtcaggtccggaaggaagcagccaaggcagatgacgcgtgtgccgggatgtagctggcagggcccccacccatttctgcctcccaccgtttcgtcaaaaaatcccaacatggctaaactttaaccacaactgacgtcgcaagaattgtctggctgcgcagtacgcttcggaggtatgtctgatgaagtatgttgatggttttgtggttgccgttcctgccgataaaaaggatgcctatcgggaaatggccgctaaggctgcgccattgtttaaagagtttggcgcgcttcgtattgtcgaatgctgggccagcgatgtaccggatggcaaagtgaccgattttcgtatggcggtgaaagcggaagagaatgaagaggttgtctttagctggattgaataccctagtaaagaggtccgcgacgctgctaatcaaaagatgatgagcgacccacggatgaaagagttcggcgagtccatgccgtttgacggcaagcgaatgatctatggcggattcgagagtatcatcgacgaataagtagcgtgacgggctgtgcggcgtgccgtcagcccaaaaattcacaaatgttgctcggcccagcgtaagaaatcttctttcggtaatgccttgctgtagagccagccctgaccgtagtgcacgccatgctggcgtaaccactcttcttgtttactggtttcgattccctccgctaccattttcagtttcagtgtttttgccatttcgatgatatgcggcgtgacatttttatattccagcgcatcaacgaaagatttatcgatcttcagaatgtcgacatccagatcctgtaaataacttaaactactataccccgtaccaaaatcatcaagataaatttcatggcccgcctcccggtagcgagaaattatcggggcgctggttttcggatcggcaaactcgcgttcagtgagttcaagcgcgatctgtctgggattaacctgatagtgattgatcatgtcacgcagcaattgcgggattttttcgctggtgagcacgggggattcaagattgatgctaatatgctgctgtggatgctgacgcagccagtcgcccatatcttcaaagacgcttcttataatcagtagcgtcaatggctcagaaaggcccgtttgctgtgccagcggaataaaactatctggactcaaccaactaccgtctgtctgcggccagcgcgccagtgcctcagcaccgacaattttgccattggctaaggagacaatcggctgatagtgcacgcaaatatcacgattttcgatagcatcctgcagccgatgatgcggactctgaatacggcgcaaaatacgcagcacaaacatcgctgccagcaggccaatcaccaacccgagcggtaaccaaataaagacttgccgatgccagcctttctgcaacattttcgtactagcccatgtgatgatgctaatattcatctccggtaagggcaggatatcgtaaatgattccattattttcgatatgctcaccgggtgttttttgtagcctggtaataattccctgagcaatttcatcgctgctggttatgacaacgttatgggcattgccaataatggcggcatcaatttgccaactgctatagggaatgacatcaataaaggaagcggggtcgatcatgacgacataatgtgccgttcccatggcgaccatgtaacggataatgcctaaatcgttatggcttgttaaccagacacgataaccatctttgctaattttacctggctcggggaaggtatcgggcggactttcatgctccagagagctacactggggaacgttgttatcgatataagccacttcctgaatatagcgataactgtaagatacccgacgcatttccatgagatgggcttcgctacaggcagcgccttgccatctttccagctcctgcagcgcatctttcccttgtgtcgccaccttattggctcgaatagcgacgcgggaggaataggtatccagctcttcaataaagcttgtttctacctgctgatgggccagccagatgcttaagccgacaggcagcaatacactaagaatcagtactccgctaataaggccgaccagatgtcgtgttctcaccagcatatccttattaacacagtgtagggaaagtatatctgattgtggaaaaaggctggctggagataaggaggtagagctggtatttcatgaagtgatgggtggaaacgatcattgtcatttgaccaggcgcagagctttacgcctggtatgtaaccctaacttaagatgtactttcggcgcgagcgagggtaaaaatatcgtaaaaagacagttcacctttacggacgatcattttttgcagttgttccttatgaacatccgcgacacgcggagagttcaagatggcttcaaccagcgcggcaggtacaaagcgcgtgttgtaccattcgccgttatagcaaacgcggaaatccagcacgtcgatatcttcatagcggtagcgtgggtagacatcgaaaaagaagaaaccattaagcaggataaataatacaaccagtagccagacagagccactcagcgtttcggactgcaacatcaccgccagggtggcaaaaaaagcaacgtacataccgataaacagccccggatgtttacggataaaactgatactaaagcggggtttgttgtcgcgtttttcgcgggtattcagagactcaatcgtttcggtcagcaggcgttgtatttcggtcatcgtttgccttcgtggtatctgcaactttccagggaacaccctattttaacgtgggaatagtagaggggaagtaacagatctaccacaattttgcataacagttgcgaaaaaccgattacaattttttaattattctggctggattaccgcccacgacaacgttgtccgggacatcttttgtgacaactgcaccactggctaccacgacgttatcaccaatggtcacaccagggttaatgaccgcgcgtccgccaatccagacgttattaccgatggtgacgggtttccccagttcagcaccgctattacgtgctacagggtcgatgggatgtgttgccgtgtagatatgaacgcctggtgccaacatacagttatcaccgatgcgaatagggcagacatcaagcatcacgcaatcgaagttggcgaaaaaattattaccgagaaaaatgttatagccatagtcacagcgaaacgttggctcaatataagcctctgtcacctgaccgaatagatcagcgagaatttgctggcgtaatgtgtgctcttccgccagggaatgattgtatcggtgaataagctgacgagcgcgcaggcgatcgcgagataacgtctcatctgcgctgcgatacaactcaccagcaatcatcttttctttttctgtgctcattactgacctccggttgctgaaaatgcggcaacacagtaagacgaaaagtcagtgaagagaacgttcccattacatctgtgtgataaagatcacatagggtatgtcttcatggcgaaaaagtataaaattcttaataaacagccggttatagctccgaaagcgaattatttattagcgaataaatttccatacactggaagggatcttgtcgtacagtttattcatggtcaattcggcgaggcggtgatctgcggcactgtaaaataccgccagttcattatcacttaattcgtatttatttttctcgataacacgctccagcgtgtcaattgtctggcaacgacgtaaacgcattaaataatcggttttcgttaaaggtttttcggacatacttctacctatggttgtaataattttaacaagataaactcgcaggattctctttcgtcgcattgacaaaacaacggaatagtcgattaccactcttccgccatttctgaagatcctgcatattaataccataactactgaacaacataaaggtgtcatccagatattcgtcgatctgctcaatgagcttattgtcttcattatacttaattttgtaattaagtgcgaaggtcgcaatatgctcaatcagttcattcaactggaggttgatcgcgctggttgggtcgtttacccagccatgattgctttcttcaaggtttgcaaggcagtcatgatacagggtttcacagagaaacttaagctgtgcgatatcatgtcttttgggactgtattcatccataacgcgtccccttcttagcggttgaactaacggacacctttcgggatggaaaaaacttactgacctggacttgccctctcgtttgttagcttaactataagccactctttgcaggttttcatcgcattattacgaaaaattacaattaggaaggaagcgggacaggactcactttttcatactagcactaacccgcagcaggtaaaagcagtttgctcgaactattcataacatttcaggattatcgccagatgaaattggtgacactaataccaggattgctctgaatatgacgtaataaccgaggaatgaataaagaattaccgcaaataattaagaatagcctctaaatgattatggattattaaatctattagcgctacttaatataaattaactaacaatcagtattttttatgaattttatccgtggttaatactggttttcgtatgagatcctgagttggtggttcaattactccttaatgttcgtaggttatgcataaaaaaggccgcttacgcggccttagtgattacacgttgtatcaatgatgatcgacagtatggctgtgctcgatatcttcattcttgcggctaaagcggcggcgaaccaccacaaagaataccggaacgaagaagattgccagtaccgttgcggtcaccatcccgcccattacaccggtacctactgcgttctgcgcgccggaaccagcaccagtactgataaccagcggcataacgccgaggataaacgccaggctggtcatcaggatcggacgtaaacgcatccgcaccgcatcaagcgtcgcttcaatcagacctttaccttctttatccatcaagtctttggcgaattcgacgataaggatcgcgttcttcgcgctcaacccaatggttgtgagcaggcctacctggaagtaaacgtcattggtcaggccacggaaggtggcagccagcaacgcaccgataacccccagcggaacgaccagcataacggagaacggaatgctccagctctcgtacagcgccgccagacacaggaacacgacaatcaagctaatcgcgtacagactaggtgcctggttgccggagagacgttcctgataggacatccccgtccagtcatagccaacaccggtaggcagtttgctcgccagttgttccatcagctccattgcttcaccggtacttttacccggtgccgcctggcctaagatttccatggatggcaggccgttgtaacgttccagacgcgggctaccgtactcccaacgagaagaggagaacgcgctgaatggcaccatctgaccatcagcagcacgaacataccagtcgccgatatcatccggcagcatacggtatttcgcttcactcatgacataaactttcttcacacgaccgcggtcgataaagtcgttcacatagctgccgccccatgcagcgcccagagtggtgttaatgtcgttgatagaaacacccagcgcctgcgctttttcctggtcgatatcaatcttaaactgcggggtatcttccagaccgtttggacgtacgctggtcaacatatcagggtgcttcgctgcttctgcaagcaactggttacgcgcctgagtcagtttttcgtgaccaaggccagcctggtcaatcagctcaaagtcaaagccggttgcagtacccagttccacgattgcgggcaggttaaaggcgaaaaccatcgcatctttgatttggctgaaagcgcgtgttgcacgcatggtaatcgcttcaactttgttttcttcgcccggacgatcggcccagtccttcaaggaaacgaacgcaataccggtattctgaccacgtcccgcaaagccgaagccgttaacggcgaacacgctctcaacgttgttcttttctttggtcagatagtaatgcgttacctcattgagcactttctgtgtacgttcctgcgttgcacctgctggcagctgaaccatggtcataaacacgccctggtcctcatctggcaagaaggagcttggcagacgcacgaacagataggccatgccgaccacgatgatcagatacagcaccaggtaacgccccgtactgcgcagaataccgcctacgctgtcggtgtagtggtgcgtgctcttctcgaacatgcggttaaaccagccgaagaagccttttttaccttccccgtgatcgcctttggcaatcggtttcagcatggtggcacaaagagctggagtcaggatcaacgccaccagtacgctcagcgccattgcactaacaatggtaatagagaactgacgatagatagcaccagtagaaccgccaaagaaggccatcggtacgaataccgcgctcagtaccatcgcgataccgaccagagcgccctgaatctgccccatgctcttacgggtagcttcttttggcggcaaaccttcttccgccataacacgctcaacgttttctaccacaacgatggcgtcatccaccaacaggccgatggcgagcaccatcccgaacattgttagcgtgtttatgctgaagccaaaggcggcaaggacggcaaaggtcccgagcaataccaccggtacggcaatggtcggaatcaacgtcgcgcggaagttctgcaggaacagatacataaccaggaacacgaggatgatcgcttcgaccagcgttttaaccacttcgtgaatagagattttcacgaacggcgtggtgtcgtatgggtaaacaattttcagaccgctcgggaagaacggttccatcttcgccagttcagcacggattgccgcagcggtatccagcgcgtttgcaccggtcgccagcttgatccccagaccggaagccggttggccgttaaactctgcgatgatgtcgtagttctcaccacccagctcaatcttcgcgacgtcacgcagcagcacgcgggaaccatcctgattcactttcagcaggattttgccgaactcttcagtagaggtcagacgcgtctgagcaataatagaggcgttaagctgttggcctttcaccggcggcgtaccaccgagctgacccgccgcaacctgggcgttctgcgctttgatggcggtaatgacatcaaccggcgttagctggaatttgttcagctcattcgggttcatccagatacgcatcgcgtactgactaccgaacaactgaacatcacccacgccgctcgtacggctgatggcatctttcatattcgccgccacgtagtcggagatatcctcctgcgtcatggtgccatcggtgttgataacgccgacaaccatcaggaagctgctggaacttttctcaacgctcaccccttgctgctgaacttcttgcggcagcaacggcatcgccagctgcagtttgttctgcacctgaacctgcgcgatatccgcatcagtaccagactcaaaggtcagggtgatctgcacggtacccgtggagtcactgttagaggacatgtacatcaggttatcgataccgttcatattctgttcgataacctgtgtcaccgtgtcctgcactgttttcgcatcagcgccggggtaggaggcggagatcgttactgccggcggtgcaatcgtaggatattgcgccaccggcagtttgaggatcgccagcccccctgccaacatgatgataatggcgatcacccacgcaaaaatcgggcgatcgataaagaaattaggcatgtcttaacggctcctgtttaagttaagacttggactgttcaggctgagcaccgcttgcggcttgctggttattatcagcggtaacttcttgtgcttttacctggacaccaggacgcactttctgcagcccacttattactacgcgatcgcctgctttcagaccttctgtcaccagccacttatcgccaatagcctggcttgcaacgatcggacgggtttccactttgtcatccgcgccaactaccagtacggtggcatcgccacgcggcgtacgggttacgccctgttgcgggactaaaatagcgtttggattaagcccttcttccagacgtgcgcgcacgaacatacccggcagcagagtgtgatccgggttcgggaagatagcgcgtagggtgatagacccagtggtctgatcaacggtaacgtcagagaattccagcgtaccgtcctgcgggaacttaatgccgtcactggtgatcagactcactttggctttgccgttctcttgtttcagcgtgccattcgccagttcctgtttcaggcgcaggaagtcgttgctggactgggtcacatcaacgtagatcggatcaagttgctgcacggttgccagcgcagtcgcctgaccgttctgtaccaatgcgccttccgtcacgttgctcttaccaatgcgaccgctaatcggagaggtgactttggtgtaagccagattgatccgcgcagtttcaacggcagctttcgccgcagttaccgcagcattcgcctgttgcgcatcagccagagcctgatcgtactcttgcttactgatgtactgagtaccgagcagtttctgataacgattcaccgtcaattgcgcgatattggctgcagcctgggctttcgccagatcacctttcgcactgtcgtatgtcgcctgataggtcgcaggatcaatctgatagagagagacacctgcttcgatgtcgctaccttctttgaaattacgcttcaggataatcccgctaacttgaggacgaacttctgcgatccggtaggcactggtgcgacccggaagctcggttgtgatctgcagaggttcagttttgactgttactacgccaacggcgggcatctgctggccaccttgttgggcctgtttgtcgtcacatcctgttagggctaagctgccactgagcatcagaacgaccgccagaggcgtaaaccctctgtttttgttcatatgtaaacctcgagtgtccgatttcaaattggtcaatggtcaaaagttaataaacccattgctgcgtttatattatcgtcgtgctatggtacatacattcacaaatgtatgtaaatctaacgcctgtaaattcacgaacatatggcacgaaaaaccaaacaagaagcgcaagaaacgcgccaacacatcctcgatgtggctctacgtcttttcagtcagcagggggtaagttccaccagcctgggcgagattgcaaaagcagctggcgttacgcgcggtgcaatctactggcattttaaagacaagagcgatttgttcagtgagatctgggaactgagtgaatccaatattggtgaactagagcttgagtatcaggcaaaattccctggcgatccactcagtgtattaagagagatattaattcatgttcttgaatccacggtgacagaagaacggcgtcgattattgatggagattatattccacaaatgcgaatttgtcggagaaatggctgttgtgcaacaggcacaacgtaatctctgtctggaaagttatgaccgtatagaacaaacgttaaaacattgtattgaagcgaaaatgttgcctgcggatttaatgacgcgtcgcgcagcaattattatgcgcggctatatttccggcctgatggaaaactggctctttgccccgcaatcttttgatcttaaaaaagaagcccgcgattacgttgccatcttactggagatgtatctcctgtgccccacgcttcgtaatcctgccactaacgaataaccctgaatctgactccaggatttttcctggacattttcgtcgttgctattctggttcactgcgtcgtgatattcttgcggtttgactttttcaggtcgttcttcaggttcagaaaccttcattcatcatgactatgttccagtattacaaacgaagtcggcattttgtttttagtgcatttattgcttttgtttttgtcttgttatgccagaacacggcgtttgcgcgggcgagtagcaatggtgatctgccgacaaaagcggacctgcaggcgcaacttgacagtctaaataaacaaaaagatctttctgctcaggacaaactggtgcagcaggatctgacagatacattagccaccctcgataaaatcgatcgcataaaagaagagacagttcagctacggcaaaaagtcgctgaagcgccggaaaaaatgcgccaggcgaccgcggcgttaacagcacttagcgatgtcgataacgacgaagaaacgcgcaaaattctgagcacgctgagcttgcgccagctggaaactcgcgttgcccaggcgctggacgatttgcaaaacgcacaaaacgatctggcgtcttataacagccagctggttagcttacagacgcagcccgaacgcgtgcaaaatgcgatgtataacgctagccagcagctgcaacaaattcgcagtcgtctggatgggactgatgtcggcgagacagccttacgtcccagccagaaagtgttaatgcaggcccagcaggcgttgctgaatgcggagattgaccagcagcgtaaaagcctggaagggaacaccgtcttgcaggataccttgcaaaagcaacgtgattacgtgacggcgaacagcgctcgtctggagcaccagttacaactgttgcaagaagcggtaaacagcaagcgcctgactttaaccgaaaaaacggcgcaggaagccgtctccccggatgaagccgcgcgtattcaggctaatccgctggtgaagcaggaactggaaattaaccagcagttaagtcagcgtctgattaccgcgactgaaaacggtaatcagttgatgcagcaaaacattaaagtcaaaaactggctggagcgggcgctgcaaagcgaacgcaatattaaagagcagattgccgtcctgaagggcagcctgctgttgtctcgtatcctttaccagcaacaacaaacgctgcccagcgcggatgaactggaaaacatgaccaaccgcatcgcggatttgcgtctcgaacagtttgaagttaaccagcagcgtgatgcactcttccagagcgatgcgttcgtcaacaaactggaagaaggtcacaccaacgaagtcaacagcgaagttcacgatgcgttattgcaagtggttgatatgcgtcgcgaattgctggatcaactcaacaaacagttgggtaaccagctgatgatggccattaacctgcaaatcaaccagcagcagttaatgagtgtgagcaaaaacctgaaatccatcctgactcagcaaatcttttgggtgaacagtaaccgtccaatggactgggactggatcaaagcgttcccgcaaagcctgaaagatgaatttaagagcatgaaaatcacggtgaactggcaaaaagcctggcccgccgtttttatcgctttcctcgctggtttgccgctgctgttgattgccgggctgatccactggcgtctgggctggctgaaagcgtatcaacaaaaactggcttccgctgtgggttccctgcgtaacgacagccagctcaacacaccaaaagcgatccttatcgacctgatccgtgcgctgccggtgtgcctgattattctcgcggttggcctgattctgttgaccatgcagctcaacatcagcgaactgctatggagcttcagcaaaaaactggcgatattctggctggtgtttggcctgtgctggaaggtactggagaaaaacggcgttgccgtacgtcacttcggcatgccggaacagcagaccagccactggcgtcggcaaattgtccgcatcagtctcgcattgctgcctatccatttctggtctgtggtggcagaactttccccgctgcatctgatggatgatgtgctggggcaagcgatgattttcttcaacctgctgctgattgccttcctggtatggccgatgtgccgcgaaagctggcgtgataaagagagccacaccatgcgactggtcaccattaccgtgctgagcataatcccgattgcgctgatggtgctgactgctacaggctacttctacactacgctgcgtctggcaggacgctggattgaaaccgtttatctggtgatcatctggaacctgctgtaccagacggtactgcgtggcttaagcgtagcggcgcggcgtatcgcctggcgtcgtgcgctggcgcgtcggcagaatctggtgaaagagggcgcagaaggtgctgaaccgccggaagaacccaccattgcactggagcaagttaaccagcagacgctgcgtattaccatgttgctgatgtttgcgctgttcggtgtcatgttctgggcaatttggtccgatttgatcaccgtgttcagctatctcgacagcatcacgctctggcattacaacggcactgaagctggcgctgcggtggtgaaaaacgtcaccatgggcagtctgttgtttgcgattatcgccagtatggtggcctgggcgttgattcgcaacctgcctggtttactggaagtgctggtgctcagccgactgaatatgcgccagggcgcgagctatgccattactaccatccttaactacatcattattgctgttggtgcgatgacggtgttcggaagcctgggcgtctcttgggataaactccagtggctggccgcagcattatccgtaggtcttggttttggtttacaagaaattttcggtaacttcgtctccggtttgatcattctattcgaacgtccggtgcgtattggcgatacggtaaccattggtagcttcagcgggacggtaagtaagatccgtattcgtgcgacaacgattaccgatttcgatcgcaaagaagtgatcatcccgaacaaagcgtttgttaccgagcgtctgatcaactggagcttgactgacactactacgcgtctggtgatccgtctcggcgtggcctatggctccgatctggaaaaagtgcgtaaagtgttactgaaggcggcgactgagcacccaagggtgatgcacgaaccaatgccggaagtcttctttacggcatttggtgccagcacgttggatcatgagctgcgtctgtatgtgcgtgaactgcgtgaccgtagtcgtactgtcgatgagctgaaccgtactatcgatcagctgtgccgtgaaaacgacatcaacattgcctttaaccagcttgaagtgcatctgcacaacgagaagggcgatgaggtgacggaagtaaaacgcgactacaaaggcgatgacccgacgccagcggtagggtaaaaacgaaagggggcaacatttagttgccccgagattgctaacaaagtgcgcgttgttcatgccggatgcggcgtgaccgccttatccggcctacgaaaccgcaagaattcaatatattgcaggagcggtgtaggcctgataagcgtagcgcatcaggcagttttgcgtttgcccgcaaccttaggggacatttagcgaccccatttatttctcacttttccgcctcatcatcgcgcgttaatttcttttcataatcacgctttacaatatccagcgcgcgcagcacggtactggcagggatctgattttcctccagcagcacaatcaaatcgacagccagtttgacatcgtcaggggcattttccagactcatattctctccattgttagcgggttaaacgcgctaacctgttttcgattttttccagcgcatggcggcagcgtgccaggcgcgcttcataggcttccacttcacgatgcagcgtttgctgttccacgagatcggtcacccgcgccagacgggctctgcgttcggcaaccatctcacgtagccgccgctcaaaatcctgatgctgaatacgtttacgctgccagcgggcaattttcggtggtgcactgtcccactcgcgcaaactccaggcggaggcttcacgcgcgatggcttccagttgtgccgccagatgttccgccagccaggccacttgcggcagctgttgctgctcaactgcatgacgaagcgcagccagattatcgcccgcctcgtcgagacaagcctgtagtgttgtcgcacgagtctgaaaaagatgcctgtcgaaacgagcacttagcgtggcgaactgactcaccggggcacaacgctgacgcagcgtagcgagctgtccttccagtttttccagcagcagggcggttttcacgataagacctcaatgaaaatgataattgttatgctaaagtagccactctgtaagctgacaacactcaatatgcaacgaatcattttaatcatcattggctggctggcggtagtgctgggtacgctgggcgtggtattaccggtattaccgacgacgccgtttatcctgctggcggcctggtgctttgcccgttcttccccgcgctttcacgcctggttgctgtaccgcagttggtttggcagctatctacgtttctggcagaaacatcatgcgatgccgcgcggcgtcaaaccgcgggcgattttgcttattttgctcacgtttgccatttctctgtggttcgtccagatgccatgggtgcgcatcatgttgctggtaattctcgcctgtttgcttttctatatgtggcgaattccggtgattgatgaaaagcaagaaaagcactgaagcacaacaatcgcagttgcaattattgcgtacagccagtacattctggcgttttcgagcacaggcgcaggcggtcaaaggttaaacaactgttacttttgatacgtttaaaacgcgccgtgagtaccaccgtaacaagcaggcatacacttatgaccgcgactgcacagcagcttgagtatctcaaaaatagcatcaaaagcattcaggactacccaaaacccggcattcttttccgcgatgtcaccagcttactggaagacccgaaagcttacgctctcagcatcgacttgctggttgagcgttacaaaaatgcgggcattaccaaagttgtcggcaccgaagcgcgtggcttcttgtttggcgctccggtagctctgggtctgggcgttggctttgtaccggtccgtaaaccgggcaaactgccgcgtgaaaccatcagtgaaacttacgacctggaatacggcaccgatcagctggagatccacgttgatgccatcaaaccgggcgacaaagttctggtggtggacgacctgctggcaaccggcggcactatcgaagcgaccgttaaactgatccgtcgtctgggtggtgaagtggctgacgctgcgttcattatcaacctgttcgatctcggcggcgaacagcgtctcgaaaaacagggcattaccagctacagccttgtcccgttcccgggccattaattatcgccagtcttgtgctgcccacgctacggacagcacaagatgtgcattcagcctcgccgttctgacggggctgtgttagcattaccccttcgtgaatccaccttccagcgtttcagagcctgccaatgagttatcaggtcttagcccgaaaatggcgcccacaaacctttgctgacgtcgtcggccaggaacatgtgctgaccgcactggcgaacggcttgagcttagggcgtattcatcatgcttatcttttttccggcacccgtggcgtcggaaaaacctctatcgcccgactgctggcgaaggggctaaactgcgaaaccggcattaccgcgacgccgtgcggcgtgtgcgataactgtcgtgaaatcgagcaggggcgctttgtcgatctgattgaaatcgacgccgccagccgcaccaaagttgaagatacccgcgacctgctggataacgtccagtacgctccggcgcgtggtcgtttcaaagtttatctgatcgacgaagtgcatatgctgagccgccacagctttaacgcactgttaaaaacccttgaagagccgccggagcacgttaagtttctgctggcgacgaccgatccacagaaattgccggtgacgattttgagtcgctgtctgcaatttcatctcaaggcgctggatgtcgagcaaattcgccatcagcttgagcacatcctcaacgaagaacatatcgctcacgagccgcgggcgctgcaattgctggcacgcgccgctgaaggcagcctgcgagatgccttaagtctgaccgaccaggcgattgccagcggtgacggccaggttagtacccaggcggtcagtgcgatgctgggtacgcttgacgacgatcaggcgctgagcctggttgaagcgatggtcgaggccaacggcgagcgcgtaatggcgctgattaatgaagccgctgcccgtggtatcgagtgggaagcgttgctggtggaaatgctcggcctgttgcatcgtattgcgatggtacaacttagccctgctgcacttggcaacgacatggccgccatcgagctgcggatgcgtgaactggcgcgcaccataccgccgacggatattcagctttactatcagacgctgttgattggtcgcaaagaattaccgtatgcgccggaccgtcgcatgggcgttgagatgacgctgctgcgcgcgctggcattccatccgcgtatgccgctgcctgagccagaagtgccacgacagtcctttgcacccgtcgcgccaacggcagtaatgacgccaacccaggtgccgccgcaaccgcaaagtgcgccgcagcaggcaccgactgtaccgctcccggaaaccaccagccaggtgctggcggcgcgccagcagttgcagcgcgtgcagggagcaaccaaagcaaaaaagagtgaaccggcagccgctacccgcgcgcggccggtgaataacgctgcgctggaaagactggctagcgtcaccgatcgcgttcaggcgcgtccggtgccaagcgcgctggaaaaagcgccagccaaaaaagaagcgtatcgctggaaggcgaccactccggtgatgcagcaaaaagaagtggtcgccacgccgaaggcgctgaaaaaagcgctggaacatgaaaaaacgccggaactggcggcgaagctagcggcagaagccattgagcgcgacccgtgggcggcacaggtgagccaacttagcctaccaaaactggtcgaacaggtggcgttaaatgcctggaaagaggagagcgacaacgcagtatgtctgcatttgcgctcctctcagcggcatttgaacaaccgcggtgcacagcaaaaactggctgaagcgttgagcatgttaaaaggtagtacggttgaactgactatcgttgaagatgataatcccgcggtgcgtacgccgctggagtggcgtcaggcgatatacgaagaaaaacttgcgcaggcgcgcgagtccattattgcggataataatattcagaccctgcgtcggttcttcgatgcggagctggatgaagaaagtatccgccccatttgatcgtaagcacagcttacgttcgtcatccttaacgtgattgagagagaaacctatgtttggtaaaggcggtctgggtaacctgatgaagcaagcccagcagatgcaagaaaaaatgcagaaaatgcaggaagagatcgcgcagctggaagtcaccggcgaatctggcgcaggtctggtaaaagtgaccatcaacggtgcacacaactgccgtcgcgtagagatcgacccgagcctgctggaagacgacaaagagatgctggaagacctggtggctgcagcattcaacgacgcagcacgtcgtattgaagaaacgcagaaagaaaaaatggcctctgtatcctccggaatgcagctgccgcctggctttaagatgccgttctgatgcaaaccagcccgctgttaacacagcttatggaagcactgcgctgtctgccgggcgttggcccgaagagcgcgcagcgtatggcgttcacgctgcttcagcgcgatcgtagcggcgggatgcgtctggcgcaggcgctcacccgggcgatgagcgaaatcggccactgcgccgattgccgcactttcaccgaacaggaagtctgtaacatctgtagcaatccgcgtcgtcaggaaaacggtcaaatctgcgtggtggagagtccggcggacatctacgccattgagcagacggggcagtttagtggtcgttattttgtgttgatggggcatctgagtccgctggacggcatcggtccggatgatatcgggcttgatcgtctggaacagcgtctggcagaggaaaaaatcactgaagtgatcctcgccaccaaccccacggttgaaggtgaagctaccgctaactacattgccgagctttgcgcgcaatatgacgtggaagccagccgaatcgctcatggcgttccggttggcggcgagctggaaatggtcgacggcaccacgttgagtcactcccttgccgggcgtcataagattcgtttttaagcaaacgagagcaggatcacctgctctcgcttgaaattattctcccttgtccccatctctcccacatcctgtttttaaccttaaaatggcattattgaggtagacctacatgaaaggacaagaaactcgtggttttcagagtgaagtgaaacagcttctgcacctgatgatccattctctctattccaataaagaaatcttcctgcgtgagcttatctctaacgcctccgatgcggcggacaagctgcgtttccgtgcgctctctaacccggacctgtacgaaggtgatggcgaactacgcgttcgtgtctctttcgataaagacaagcgtacgctgaccatctccgataacggcgtggggatgacccgcgacgaagtgattgaccatctggggactatcgctaaatccggtaccaaaagtttcctcgaatccctgggttctgaccaggcgaaagacagccagctgatcggtcagtttggtgttggtttctactctgcgtttatcgtggccgacaaagtgaccgtgcgtactcgcgcggcaggcgaaaaaccagaaaatggcgtcttctgggaaagcgctggcgaaggtgaatacaccgttgccgacatcaccaaagaagatcgtggtactgaaatcaccctgcatctgcgtgaaggcgaagacgagttcctcgatgactggcgcgtgcgttccatcatcagcaaatactccgaccatatcgcgctgccggtagagatcgaaaaacgcgaagagaaagacggcgaaaccgttatctcctgggagaaaatcaacaaagcgcaggcgctgtggactcgtaacaagagcgaaatcaccgatgaagagtacaaagagttctacaaacacatcgcccacgactttaatgatccgctgacctggagccacaaccgtgttgaaggtaagcaggagtacaccagcctgctgtacatcccgtcccaggctccgtgggatatgtggaaccgcgatcataaacacggcctgaaactgtatgttcagcgtgtgttcatcatggacgacgcagaacagttcatgccgaactatctgcgcttcgtgcgtggtctgattgactccagcgatctgccgctgaacgtttcccgtgaaatcctccaggacagcacggtaacgcgtaacctgcgcaatgcgctgaccaagcgtgtgctgcaaatgctggaaaaactggcgaaagacgacgcggaaaaataccagaccttctggcaacagtttggcctggtactgaaagaaggtccggcggaagatttcgctaaccaggaagcgatcgccaaactgctgcgttttgcttctacccataccgattcttctgcgcagaccgtatctctggaagactacgtttcccgcatgaaagaagggcaggagaaaatctactacatcaccgcagacagctatgcggcagcgaagagcagcccgcacctggaactgctgcgtaagaaaggcatcgaagttctgctgctttccgaccgcatcgatgagtggatgatgaactatctgactgagttcgacggtaaaccgttccagagcgtgtctaaagttgacgagagccttgaaaaactggctgacgaagttgatgagagcgcgaaagaagcggagaaagcactgactccgttcatcgaccgtgtgaaagccctgctcggcgagcgcgtgaaagatgtccgtctgactcaccgtctgaccgatacgccagcgatcgttagcaccgacgcggacgaaatgagcactcagatggcgaaactgttcgctgcggcgggccagaaagtgccagaagtgaaatacatcttcgaactgaacccggatcacgtactggtgaaacgtgcggcagatactgaagatgaagcgaagttcagcgagtgggtagaactgctgctggatcaggcgctgctggcagaacgcggcacgctggaagatccgaacctgtttattcgtcgtatgaaccagctgctggtttcctgatgtaatgccggatgaccttcgtgtcatccggcatttttcttttcatcatctgcactttccgcaaattatctcgccattaaccgtttcagccccaggtgcctttcttgaggcaatcgcctgttggtggtatcgtttatcgctttttcaaaaaattcgacacattttaaggggattttcgcaatgcgtatcattctgcttggcgctccgggcgcggggaaagggactcaggctcagttcatcatggagaaatatggtattccgcaaatctccactggcgatatgctgcgtgctgcggtcaaatctggctccgagctgggtaaacaagcaaaagacattatggatgctggcaaactggtcaccgacgaactggtgatcgcgctggttaaagagcgcattgctcaggaagactgccgtaatggtttcctgttggacggcttcccgcgtaccattccgcaggcagacgcgatgaaagaagcgggcatcaatgttgattacgttctggaattcgacgtaccggacgaactgatcgttgaccgtatcgtcggtcgccgcgttcatgcgccgtctggtcgtgtttatcacgttaaattcaatccgccgaaagtagaaggcaaagacgacgttaccggtgaagaactgactacccgtaaagatgatcaggaagagaccgtacgtaaacgtctggttgaataccatcagatgacagcaccgctgatcggctactactccaaagaagcagaagcgggtaataccaaatacgcgaaagttgacggcaccaagccggttgctgaagttcgcgctgatctggaaaaaatcctcggctaattcgaaagcgcgcacggacagtcccctcgccccctcggggagagggttagggtgaggggaacaggcccgcacaagcaaacttatcagcaatctcaggccggatattcattcggccttttacaaaaacctcaatctgcgctattcctttttctgatttgacctctcacagcaattagttcttcttcctcacttttccgctacaattatcaacaagttgaatcgataagaggcggtaatgcgtcagactaaaaccggtatcctgctggcaaacctgggtacgcccgatgcccccacacctgaagcggtaaaacgctatctgaaacaatttttaagcgacagacgcgtggttgataccagtcggttgttatggtggccattgctgcgcggcgtgattttgccgctgcgcagcccgcgtgtggcgaagctgtatgcctctgtctggatggaaggtggcagcccgctgatggtttacagccgccagcaacagcaggcgctggcacaacgtttaccggagatgcccgtagcgctgggaatgagctacggcagcccaagtctggaaagcgccgtagatgaactcctggcagagcatgtagatcatattgtggtgctgccgctttatccgcaattctcctgttctacggtcggtgcggtatgggatgaactggcacgcattctggcgcgcaaacgtagcattccggggataagctttatacgtgattacgccgataaccacgattacattaatgcactggcgaacagcgtacgcgcttcttttgccaaacatggcgaaccggatctgctactgctctcttatcatggcattccccagcgttatgcagatgaaggcgatgattacccgcaacgttgccgcacaacgactcgtgaactggcttccgcattggggatggcaccggaaaaagtgatgatgacctttcagagccgctttggtcgggaaccctggctgatgccttataccgacgaaacgctgaaaatgctcggagaaaaaggcgtaggtcatattcaggtgatgtgcccgggctttgctgcggattgtctggagacgctggaagagattgccgagcaaaaccgtgaggtcttcctcggtgccggcgggaaaaaatatgaatatattccggcgcttaatgccacgccggaacatatcgaaatgatggctaatcttgttgccgcgtatcgttaaagctgagcggtaaagaactgagcgccgtcgcgaagagcctcgtcggcggttttcatcatccgactataatgcaaaaaggcgtgcagcgtgcctgggtagagtttgaactcacagggctgctgatgcgccgctaacgtctggtaaagcagacggctgtcatccagcagcggatcgaactccgccccggcaataaaacagggcggaacttcgcgagtgagatcattattaaacagacagtaatacgggctctcgcggtccgcgtcgttgcttaaatatgcctcttcgtacatctgcaaatcctgttgcgttaagccatcccagacaccgcccaacagacgacgagtcacggaatcccgtaatccgtaaagcccataccacagcaaaacgcccgcaactttaccgcaatcgatctgtttatcacgcaaccacaacgcactggcgagcgccagcatggcacctgcggaatcaccggcaaagccaatgcgggacatattgatttgataatcctccgcctgctggtggaaataacaacaagcagccacaatttcctctatcgcttgcggaaaacgcgcttcaggactaagggtgtaatcaataccaatcaccgtacattggctgtagcttgccagcaggcgcatgatgcgatcgtgggtatcgagattgccgagaataaaaccgcctccatgcaaataaaatagcgtcgctgggctatctggctgcggacaaaagagacgtgtttccacctgcccatattttgttggaaccatgtaagctctggttgccatttctggagcgcccgcattccagaatcggcgctcaagcgtgtaatactgtcgttgctcagcaatcgttcccgttgcgggccagggcggtaaatccggctgaagagtattcacaacggtcttcatttcagcagaaataaggtccagaacaggtagtttgttttccggcttcatacaaaaactcctttcaaattacgtcattgtaaggaaccactgccatgaaaatgcgatcccgcctgctgatattgaaactggctgcgtctcgcgcgctcccgtcagattgtgttaacattcgccgctcagttaaccacccgtaaaaacaaccatgaaatttcccggtaaacgtaaatccaaacattacttccccgtaaacgcacgcgatccgctgcttcagcaattccagccagaaaacgaaaccagcgctgcctgggtagtgggtatcgatcaaacgctggtcgatattgaagcgaaagtggatgatgaatttattgagcgttatggattaagcgccgggcatagtctggtgattgaggatgatgtagccgaagcgctttatcaggaactaaaacagaaaaacctgattacccatcagtttgcgggtggcaccattggtaacaccatgcacaactacagcgtgctcgcggacgaccgtagcgtgctgctgggcgtcatgtgcagcaatattgaaattggcagttatgcctatcgttacctgtgtaacacttccagccgtaccgatcttaactatctacaaggcgtggatggcccgattggtcgttgctttacgctgattggcgagtccggggaacgtacctttgctatcagtccaggccacatgaaccagctgcgggctgaaagcattccggaagatgtgattgccggagccagcgcactggttctcaccagttatctggtgcgttgcaagccgggtgaacccatgccggaagcaaccatgaaagccattgagtacgcgaagaaatataacgtaccggtggtgctgacgctgggcaccaagtttgtcattgccgagaatccgcagtggtggcagcaattcctcaaagatcacgtctctatccttgcgatgaacgaagatgaagccgaagcgttgaccggagaaagcgatccgttgttggcatctgacaaggcgctggactgggtagatctggtgctgtgcaccgccgggccaatcggcttgtatatggcgggctttaccgaagacgaagcgaaacgtaaaacccagcatccgctgctgccgggcgctatagcggaattcaaccagtatgagtttagccgcgccatgcgccacaaggattgccagaatccgctgcgtgtatatagccacattgcgccgtacatgggcgggccggaaaaaatcatgaacactaatggagcgggggatggcgcattggcagcgttgctgcatgacattaccgccaacagctaccatcgtagcaacgtaccaaactccagcaaacataaattcacctggttaacttatagtagcttagcgcaggtgtgtaaatatgctaaccgtgtgagctatcaggtactgaaccagcatagtcctcgtttaacgcgcggcttgccggagcgtgaagacagcctggaagagtcttactgggatcgttaagttatcgtcggttcgtaggccagataaggcgttcacgccgcatctggcatttggctctcgatgcctgatgcgacgctggcgcgtcttatcatgcctacatatttttcatattttacatccggcaaccaccgtttaccccgtcaccacctcacccgccggtggcgtttccagcagttccagcatggtacgggcgatttcacgctcgcccatcactacctgattcgcaccacgttcggtgatatacgccacttcatcgtcataatgggcgcgggcaataatctcaatatccggatttttcgcgcgggcagatgccacaatctcacccgcttcataaccgttgggaatcgtcaggatcagccattttgcacattccagatgcgccagttgcataatttcttcgttcgccgcattgcccaatactgcgcggaccccgcgctctcgcagctcatcaacacgggttcgactcgtctcaatcaccaccagcggaatatcagaggcgagcaatttctcccccagcaggctgcctacacgaccgtaacccaccagtagcgcatggttgcaaatatccactgggatctgcttctcttcttcgattgcctcttccagcgtctgctcttccagcgtttcggtcttcgccagatatttctccagtagtgcgaacagtaccgggttgagcataatgctcaggatcgcccctgccagtaccaggttttgtccggcctgcggcagtaaattcaatgccattcccagtcccgccaggataaacgcgaactcaccaatctgcgccaggctggcggcgatggttaatgccgtacgttgggagtgaccaaacagtcgcaccaggaaaaatgcggctaagctcttaccaaacagaataatcgccagcgtcgccagcactgccagcggttgctgaatcagaattaacggatcaaacaacatcccgacggagacaaaaaacagcaccgcaaacgcgtcgcgcaatggcagcgtatcgtgggcggcacggtgactcagttcagactcgttcagtaccatcccggcaaagaacgcaccgagtgcaaaggagacatcaaacagctctaccgcaccaaaggcaacccctaacgccagcgccagcacgctcagggtaaacagctcgcgagaaccggttgccgcgctgcgtgccataatccacggcaccagacggcgacctaccagcatcataatggcgataaatgcgatcactttgccgatggtgatccccatatcgactgcaagagtggcaaagcccacatcgccctgttccatcattcctgccactgcgggcagcaacaccagcgtcagaaccattaccaggtcttccacaatcaaccaaccgatggcgatttgcccacgctgactgtcaattaattgccgttcttcaagtgcgcgcagtaacaccacggtactggcggtggaaagacataaaccgaacacgataccggtcattaagctccagcccagcacggcagagagcgccatacccagcagcgtcgccacggctatctgggcgatcgcaccgggaatggcgatggcctttaccgccatcaaatccttcaggctaaagtgcaaaccgacgccaaacatcaacagaatgacgcccagttcagccagttccggggcaagcttggtatcggcaacaaagcccggagtgaatggtcctgccagcacacccgctaacagatatcccaccagaggagaaatacgtagtttattggccagcatgccgaggataaaggcgagcacaaggccgccaacaatggtggtgataagcggggtggcgtgatgcattccgtctccttttcctggtggttattgtccatttttggccgggaaaaccaaaattacaggtaatagtttatgacaatttcattgatgatgttcatgaataattattgaattttgcagaaaaatggaattagctgcaaaaaaagcacggatcggaaaacagaaggcggtttaacagaggaaaggcttatggcgactgtaaaacgatgcagccaaagtttgcctttggctgcaatgaaatcagtctttatgccggttatcaggcaggaatatggtcaacatccccaatagtggcaggaaagcacagattttatagactaactcgatgctggtgtgatcggcgataagccccagaactgccgctcccagacctcccatgccaaaagcaaaaccgaaaaagagtccagaaaccataccgatacgtcctggaagcagctcctgagcgtagaccagaatggcagagaatgcgctagcgaggataaatccaataatcaccgttaaaacccccgtccagtgcaggctggcgtagggtaaaatcagcgtaaacggcgcaacgccgaggatagagccccaaatcacatatttccgcccaattttatcccctacaggcccgccgatcaccgtacctgccgcaacggcaaacaggaaggcaaacagatgaagctgagcattctggatagataatccgaatttttgcatcagataaaaggtgtaatagctgctgatgctcgccatatagaaatatttgctgaaaatgaggattaacagaatgctgaccgccagtacaactttattgcgcggcagtggattgataatcgtcgctttgggttttcctttattcattcggtgctgtgcgctgtaccaacggctgatttgcgccaacaccacgatcgccagcagtgccgcaagcacaaaccaggcaacgttgcctttgccataaggcgcgataatcaccgccgccagcaagggtcccagggaactgccaaagttgccgccgacctgaaagatagattgcgccaggccatgccgcccgccggaagccatacgggccacgcgagaagattccggatgaaagacgctactaccggtaccgaccagcgccgccgccagcagaactgcgccaaaactgcccgccagcgcaagcagcaccagaccgcttaaggtaaagcacatgccaattggcaagctccatggcatcggatatttatcggtccagtagccgaccactggttgcagtaggctagaggcgagctggaaggtgagggttatcatgccaatctgcataaatgtcagagaaaattcactctgaagcagcggataaatcgccagaatcaggctttggatcatgtcgttcagcagatgactgaggctgatagcacctaaaataccaaagcttgttcgggccttggtcgtactcgcagccgcgcccgccacaggctggggttgttcactcattgccataggaaagtcactttttcagggttgcgatgtaaagaatgatcttatttgtgattattaccagactaacatacctgtatgcgtcgtctgaaggaagtctcaacgccgaatacagaatttctaatctggatgcagatttatcttcaccggacgcagacttgtctatgatgtcgcgtcatactatttttcaacacgttgaaatcaggtcagggagagaagtatgaaattattgcagcggggcgtggcgttagcgctgttaaccacatttacactggcgagtgaaactgctctggcgtatgagcaggataaaacctacaaaattacagttctgcataccaatgatcatcatgggcatttttggcgcaatgaatatggcgaatatggtctggcggcgcaaaaaacgctggtggatggtatccgcaaagaggttgcggctgaaggcggtagcgtgctgctactttccggtggcgacattaacactggcgtgcccgagtctgacttacaggatgccgaacctgattttcgcggtatgaatctggtgggctatgacgcgatggcgatcggtaatcatgaatttgataatccgctcaccgtattacgccagcaggaaaagtgggccaagttcccgttgctttccgcgaatatctaccagaaaagtactggcgagcgcctgtttaaaccgtgggcgctgtttaagcgtcaggatctgaaaattgccgttattgggctgacaaccgatgacacagcaaaaattggtaacccggaatacttcactgatatcgaatttcgtaagcccgccgatgaagcgaagctggtgattcaggagctgcaacagacagaaaagccagacattattatcgcggcgacccatatggggcattacgataatggtgagcacggctctaacgcaccgggcgatgtggagatggcacgcgcgctgcctgccggaagcctggcgatgatcgtcggtggtcacagccaagatccggtctgcatggcggcagaaaacaaaaaacaggtcgattacgtgccgggtacgccatgcaaaccagatcaacaaaacggcatctggattgtgcaggcgcatgagtggggcaaatacgtgggacgggctgattttgagtttcgtaatggcgaaatgaaaatggttaactaccagctgattccggtgaacctgaagaagaaagtgacctgggaagacgggaaaagcgagcgcgtgctttacactcctgaaatcgctgaaaaccagcaaatgatcagcctgttaagtccgttccagaacaaaggcaaagcgcagctggaagtgaaaataggcgaaaccaatggtcgtctggaaggcgatcgtgacaaagtgcgttttgtacagaccaatatggggcggttgattctggcagcccaaatggatcgcactggtgccgactttgcggtgatgagcggaggcggaattcgtgattctatcgaagcaggcgatatcagctataaaaacgtgctgaaagtgcagccattcggcaatgtggtggtgtatgccgacatgaccggtaaagaggtgattgattacctgaccgccgtcgcgcagatgaagccagatagtggtgcctacccgcaatttgccaacgttagctttgtggcgaaagacggcaaactgaacgaccttaaaatcaaaggcgaaccggtcgatccggcgaaaacttaccgtatggcgacattaaacttcaatgccaccggcggtgatggatatccgcgccttgataacaaaccgggctatgtgaataccggctttattgatgccgaagtgctgaaagcgtatatccagaaaagcagcccgctggatgtgagtgtttatgaaccgaaaggtgaggtgagctggcagtaatccgaaagtgccggatgtttgcatccggcacaatgcttaatcgcggcgggcgatatcagcaaatttggcatcgaggatctttgccagatcgcctgccgccagttcgatatccagtccgcgcttgccgccggaaacataaatagtggcaaattcttgtgcgggggcgtcgataatcgttggcagacgttttttctgccccagtgggctaatccccccaaccaggtatcccgtgctacgctgcgcgaccatcggatcggccatctcaactttcttggcacccagcgcttttgctacttttttaagatccagttgacctgcgaccggcgtaacggccacggcaaggtgtttcatatcaccgttcactgccaccagcagcgttttgtagacctgatccggattcaaacctaattttttgacgacttcatcgccaaaattggtttcagccggatcgtgctcgtaggtatggatttgaaagctaatcttgtttttttcgagtaatttaactgcgggtgtcatggtaattttcctgccttaaacaaaaaaacgaagcaagcatacgcctgatggcggtccaaaaaaaagagtcatcttgcctaagagtattggcaggatggtgagattgagcgacaatcgagttacaccgtcgcttaaagtgacggcataataataaaaaaatgaaattcctctttgacgggccaatagcgatattggccatttttttagcgcaacatttgcggcaaattcccttctccatacaggtgtagtgcaccgaccgcgaccacatatcgccccggcggcatggcgcgtaatttatcccgccaggcgagatttcgctgatgcatcagcacatcgtacaggctctgactgaacgtattgggcagcgttatatcattattttgcggcggtgcattcagccaccagctcatcatttgttgcagcaaccgtgcgttggtatgccagtgggtcagcgtatcgtccagcagcgccagtcctttgtcagggagctggagcaacatggcaatctggttttcagccccttccagttcaatcacgggtttatgttgttgcttcgccgcctgcaatagctggtaatcgataccgtattctgcccgcagccccagtttttgtgcctgcgtcgcctgaagaaccatcgcgatttgccacagcggttgggtagaaaagagactgggagaaatgcccatctcctggctaatgtgctgcaggttttggagttgctcctcgctaatgcgctcttccagcgcctcgcaggcaggcaaattagcaaaaggcgtatcgctggtggaaacatccgcctcgacgatcagcgcatcggcgtttttgagctttttgagcaaacgggtgggcaggggagccatatcgtggctacccatatgaatactgccaatcagatgaaaatggcgattgccggggagggtgatatcgatggcaggccaggtgtaatgattaccgcgcagcgcggcccaaagcgtttttacccggtacaacagatccatacgacctccctttgtgaaatatcatgctagcgcgcggtgagggatggcgcaaatggagttggagacttgtttaatgtgtttgtatgattcagtatgttcttgcatcgctattcacaaggaagcaacagttaaaaaccatgaaacaggcaacaagaaaaccgacgacacccggagatattcttctctatgaatatctggaaccgctcgatttgaaaatcaatgagttagcagagttgctgcatgttcatcgtaatagcgtcagtgcactgatcaataacaatcgtaaactcactactgagatggcatttcgtctggcgaaagtttttgataccacagtcgatttttggctaaacctccaggcggcggttgatctttgggaagttgaaaacaacatgcgcacccaggaagaattgggacggattgaaacagtggctgaatatttggcacgccgtgaagagcgtgcaaaaaaggtcgcgtaaggccaaaacatcgcttcatctcgtaggccggataaggcgttcacgccgcatccggcatccgagcaccattgcctgatgcgacgcttacccgtcttatcaggcctacaaacttgtgcctgaaccgtaggccggataaggcgtttacgccgcatccggcatccgagcaccattgcctgatgcgacgcttacgcgtcttatcaggcctacaaacctgtgcctgaaccgtaggccggataaggcgtttacgccgcatccggcagtcatgcgtcgatgccaaatgcgccaccctaaagcagcgcatccgcaatgatgtacttattccttcggtttaaaccgcagcaaccggttggcgttactcactacggtaatgctgctgagcgccattgccgctccggcaactaccgggttaagcagtgttccagtgaacggccacaaaataccggcggcgaccggaataccgatactgttgtagataaacgcaccgagcaggttctgcttcatgttgtgcagcgttgcgcgggaaatagcgagcgcatccgcaacgcccatcaggctatggcgcatcagggtaatcgccgcggtttcaatggcaacatcactgccgccacccatcgcaatgccgacatccgcctgagccagcgctggcgcgtcgttaatgccgtcgcccaccattgccacctgacgtccttcactttgcagatgtttgatcgcttcggctttaccgtccggcagcaccccggcgatcacctcatcaatccctgcttctttggcgatcgcattggcggtggttgggttatccccggtcaacatcaccagacgatatcccgctttatgcaggcgttgcagcgccgccacgctatcactacgcaacggatcgcgtactgccagcagggctaccgctttcccgtcaaccgccagcagcacaggcgttgccccttggcttgcctgagcagtaatctccgcttcgatagctttggtaccaacctgttgctcatttaacagcgcctgattgcccagcaataacgcatgaccttcagcttcaccgctcacgcccagcccgcgcaatgtgcggaaaccgttgacctgcggtagctgcatatcacctgctttatcgaggatcgctcgtgccagcggatggctggaaccttgctccagtgccgccgccagacgcaatgcctgcgcttcatcaacatcagcaaatgttttcactgcgacaacctgcggcttcccttcagtcagcgtcccggttttatcgaacactacagtgtcgagtgtactggcgcgttgcagcgcgtcagcgtcccgcaccagcacgccaaactcagccgcccgcccgacgccggaaataatgctcatcggcgtcgccagccccagcgcacacggacaggcaataatcagtaccgtggtggcaatcaccagggtatagacaatctgcggtgccggaccaaagaaataccagattgccgcactgacaagcgcaataaccaccactaccggcacaaatacggcactgattttatccgccagctgaccgatttctggcttgctgctctgggcctggcgcaccatgcgaatgattcgactcagcgtagtatggctgccaaccgcactggcacgaaacagcacactgccgtcctgtaccactgtcccggcatggacgctatcgccttcgcctttttgctgcgggattggttcgcccgtcagcatcgcttcatccagccatgcttcgccctgggtaatctcgccatctaccggcacgcgatcgccggtcgtcaggcgcagcaacatacctggctgcacttctgccagaggcacgcttttttcaccttcgtcagtaaccaggcgtgccgtcggcggggttaaatcgagtaacttttccagcgccttagaagaacgctggcgtgcgcgcgcttccagcatatggccgagattgatcagaccgataatcatcgcgctggcttcgtaataaagatgtcgcgcttccatcgggaaccactgcggccacaggttgacgctcatgctatagagccacgccacgccagtacccagcgccaccagcgtatccatcgtcgccgcaccgttcagcaggcttttccatgcactgcggtaaaaatggccgccggcgaaaaccatcactgccagggttatcaggccgataaccaaccacaggctgcggttgtcagcggtgaccatcatgttatcgccgatcatcccccagaccatcaccgggatacccaccgccagtgcgacaattgcctgccagcggaagcgcttcatcgtagcgacggcggtttcttgctggcgctcgcggcgtttagcgtcatcttcaatcgcttccgcgccgtagcccgctttttccaccgcctgcactaaatcttgtggggaggcactgcccatcaccagcgcagtacgctccgccaggtttacccgtgcctgagtgacgcccggtacgctttgcagcgcattttgtacgcgggtgacacagctggcgcagctcatgccgctcagcagcaactgctggctgtcatcgtcatcggcggtcgctgccggaagcgcctcagaaaccgctgtcagtgcttcgctcgggatactactctccgccagcggtttagcctttgggtggcttacagatgcgtcataacccgcttgtttgatggtttcgatcagctgttctgcactggcagtcccggtaacgtgcgcttcagtgatagacacatccgcctgctcaacatccggacgctgttcaagactttctttcacgcgtttaacgcagtgaccgcaggacaggccgtccagggtcaggtcgatagtttgactcataaaacactcctttaagacagttttgactggctgtgataaaggttaaaccttccagcaaggggaaggtcaagaaattaataaaccaggcgggtaaaagtccgtaaagattaaaaaatcggctcgatttgcatcaggattagacatttatctctttgttttcctgtagttaagttgcgggtgctaagttaaatcaggatgcctgaaaatcggcaccggggtgaggaattacctcccgcatctataaaaaggagttaacaaaagatgttagatgcaaacaaattacagcaggcagtggatcaggcttacacccaatttcacagtcttaacggcggacaaaatgccgattacattccctttctggcgaatgtaccaggtcaactggcggcagtggctatcgtgacctgcgatggcaacgtctatagtgcgggtgacagtgattaccgctttgcactggaatccatcagcaaagtctgtacgttagcccttgcgttagaagatgtcggcccgcaggcggtacaggacaaaattggcgctgacccgaccggattgccctttaacagtgttatcgccttagagttgcatggcggcaaaccgcttagcccactggtaaatgctggcgctattgccaccaccagcctgattaacgctgaaaatgttgaacaacgctggcagcgaattttacatatccaacagcaactggctggcgagcaggtagcgctctctgacgaagtcaaccagagcgaacaaacaaccaacttccataaccgggccatagcctggctgctgtactccgccggatatctctattgtgatgcaatggaagcctgtgacgtgtatacccgtcagtgctccacgctcctcaatactattgaactggcaacgcttggcgcgacgctggcggcaggtggtgtgaatccgttgacgcataaacgcgttcttcaggccgacaacgtgccgtacattctggccgaaatgatgatggaagggctgtatggtcgctccggtgactgggcgtatcgtgttggtttaccgggcaaaagcggtgtaggtggcggtattctggcggtcgtccctggagtgatgggaattgccgcgttcagtccaccgctggacgaagatggcaacagtgttcgcggtcaaaaaatggtggcaagcgtcgctaagcaactcggctataacgtgtttaagggctgatcatgatgaacacggaaggtaataacggtaacaaacctctcggtctatggaacgtcgtttccatcggcattggggcaatggtgggggcggggatcttcgcgctgctggggcaggctgcattgctaatggaagccagcacctgggtcgcctttgcttttggcggtattgtggcgatgttttccggttatgcctatgcgcgtctgggggcgagctatcccagcaatggcggcattatcgacttctttcgtcgcggattaggcaacggcgtctttagcctggcgctcagcttactgtacctgttgacgctggcggtgagcatcgccatggtcgcccgtgcttttggcgcttatgccgtgcagtttttgcatgaaggcagccaggaggagcaccttattttgctctacgcgttggggatcattgcggtgatgacgcttttcaactccttaagcaaccatgcggtagggcggctggaagtgatcctcgtcggcattaaaatgatgatcctgttattgctgattattgccggtgtctggagcctgcaaccggcgcatatttccgtctctgcgccccccagctccggtgcgttcttctcctgtattgggataactttccttgcctatgcgggctttggcatgatggcgaacgcggcggataaagtgaaagatccgcaggtcattatgccacgggcgtttctggtggcgattggcgttaccacgttgctttatatcagcctggcactggttttgcttagcgatgtaagcgcattagagttagaaaaatatgccgataccgccgtagcgcaggctgcttctccgctgctcgggcatgtgggttatgtgatcgtcgtcatcggcgctttactggcgacggctagtgccattaacgcgaacctgttcgccgtgtttaacatcatggacaacatgggcagcgaacgcgaactgccgaagctaatgaataaatccctgtggcggcagagtacctggggcaacattattgtcgtggtgttgattatgctgatgacggcggcactgaatttaggcagtctcgccagcgttgccagcgccacctttttgatttgctacctggcggtgtttgtggtggcgatccgcctgcgtcatgatattcacgccagcttgccgattcttatcgttggtacgttggtgatgttgttggtgatcgttggctttatctacagtctgtggtcccagggtagccgtgcgttgatatggattattggcagtctcttactcagccttattgtggcaatggtcatgaagcgcaataaaaccgtataacatctctctgtgcgcagtacttcctgtattattgtggtggcggtcgatattcgcactggcaaaaaaacgtgcttgaatatctgttgaaaccctttaacaaagcacaggaggcgttgcgcgaacgatgaacatcagcgatgtagcaaaaattaccggcctgaccagcaaagccattcgcttctatgaagagaaggggctggtgacgccgccgatgcgcagcgaaaacggttatcgcacctacacgcagcagcatctcaacgaactgaccttactgcgccaggcacggcaggtgggctttaacctggaagagagcggcgagctggtgaatctgtttaacgacccgcagcggcacagcgccgacgtcaaacggcgcacgctggagaaggtggcggagatcgaacgacacattgaggagctgcaatccatgcgcgaccagctgctggcactggcgaatgcctgccctggcgatgacagcgccgactgcccgattatcgaaaatctctccggctgctgtcatcatcgggcagggtgattaagagctgacggctcggatatgtagggttatcccttctatcgcaatgacttcaacatgcgtacctgcaccgagatcctcgctggcgctgacaggccaactactgtcaccgacgcgcatatgaccgcgcccgttgaccagcggagattccagcacaaaacgtcggccaatcagctgctgcccgcgctggtttaaatgactatcgctgtgcttttgttcgcgcacccgccggctcaaccatttccaccacagccaggcggcgagcagcgtcaggatggcaaacattaccccttgccactcccaacccagcggcaccagccagaccaccaggccggtaatcaccgctgccacgccgctccacaacaaataaccatttccgcccagcatctcggctgccagcagcaaaccgccgagactgagccagaaaatatgtggatgaacgaccattaactccatcatggctgagtccgtttgttggcgctgtctttcaccagctcggcaatcccggcaatgctccccatcaggctgctggcctctaatggcatcatcactactttgctgttactggaggaaccgatctgctgtaacgcttcggtgtatttctgcgctacgaagtagttcaccgcctgaatatcaccggaggcgatagcttcagacaccattttggtggcgcgggcttctgcttcggcggaacgttcacgcgcttcagcctgtaaaaacgcgctctgacgttcgccttccgctttcaggatttggctctgtttttcaccttcggctttgaggatttccgcctgacggatcccttccgcttcaagaatgtaagcgcgtttggtacgttccgctttcatctgcgcgttcatactagagataagctctgccggtgggcgcacgtcgcgaatttcaatacgggtgactttaatcccccacgggttggtggcttcatcgacaatacgcagcaggcgactgttgatgctgtcgcgctgagagagcatttcgtcaagttccatactacccagcacggtacggatgttagtcatggtcaggttgatgatcgccagctccagattgctgacttcataagccgcgcgcggcgcgtcaatcacctgaataaagcacacggcgtcgatggtaacgttggcgttatctttgctgataacttcctgggaagggatatcgagcacttgctccatcatattgatcttgcgaccaatgcgatccataaacggcaccaccagactgagccccggctgtaacgttttggtatagcgaccaaagcgttctactgtccactgatagccctgcggtacgattttgacacccgcgccgacaatgaccagcgcgacaaaaatgagaatcgggataaagataagcatcggaaaaacctcctgttgtaccgtccataatcagcaaaattgctgcttgattaaacaaattatacctgattactgaaagagagttcccccttattcctgcgaaggataaactgtttttagtaaaaatcagaaaaagggaacagcgatgcaggaaaatagtcctttgcttcagctacaaaacgtaggatatctggcgggtgatgcgaagattcttaataacatcaattttagcctgcgtgctggcgaatttaagttaattaccggtccttctggttgtggcaaaagtacgctgctaaaaatagttgctagtttgatcagcccaaccagcggaacgttactgtttgaaggtgaggatgtcagcacactaaagccagaaatctaccgccaacaagtctcttactgcgcccagacaccgacgctgtttggcgatacggtatacgataatctgatctttccctggcagatccgtaaccggcagcctgacccagccatttttctcgattttctcgaacgcttcgccttgccggacagcattttgacgaagaatatcgccgagctatctggtggtgaaaaacaacgcatcagtttgattcgtaacctgcaatttatgccgaaggttttattgctggatgaaataaccagtgcgctggatgaaagtaataaacataacgtcaatgagatgatccatcgttatgtgcgcgagcaaaatattgccgtgctgtgggtgacacacgataaagacgaaattaatcatgcggataaagtgattacactgcaaccgcatgccggagaaatgcaggaagcacgctatgaactcgcataactaaagaaatgcaggaagcacgctatgaacagccataatattactaacgaaagtttagcactggcattaatgctggtggtggtggcaatcttaattagccataaagaaaaactggcgctggagaaagatattctctggagcgtcgggcgagcgataattcagctgattattgtcggctatgtgctgaagtatattttcagcgtggatgatgccagcctgacattattgatggtgttatttatctgctttaatgcggcgtggaacgcgcaaaaacgcagtaaatatattgctaaagcttttatcagtagctttattgccattacggtcggggcgggaattaccctggcggtgctgattctcagtgggagcattgaatttatcccgatgcaggtgatccctatcgccgggatgattgccggtaacgccatggtagcggtggggttgtgttacaacaatttagggcaacgggtcattagcgaacagcaacagattcaggagaaactgagtcttggtgcgacgccgaagcaggctagtgcgatattgattcgcgacagtattcgcgcggctttaattccgacggtcgatagtgcaaaaacggttggcttagtgagtttaccaggaatgatgtccgggctgatatttgccgggattgatccggtgaaggcgattaaatatcagattatggtgacctttatgctgctcagtaccgccagcttgagcaccattattgcctgctatttaacctatcgtaagttttataatagccgccaccagttggtggtgacgcaattgaagaagaaatgatgcgatgccggatgcgcagcatcgcatccggcgttgtggttcatgtgccgatcaacggaatatcaatacaacaatgcatacagctggcggcgatacttgctcgccagtgcatcacccgtacccagcgcagcgaggatctcctggaacgttttacgcgtctgaccgtctgcggcggtgagatctttacgcagatgcccgaacagcaactccagcgcctcttcattgcgcccaacctgatgcagttgcagcgccagttgcgtcgccagtgcggcatcttctggattctccgccacctgctgttgcaactgttgaatttccggcgtatcagccgcctgcttcagcagttcgatttgcgccaccagcccctggtagcgggtgtcctgatcctgcaacggaatggttttcagcaccgcttccgcatcttcagaacggttcagcgcaatcagcgtttctgccagcagcaggccgatctccccgttctgattgctcaactgccaggcgtctttcagcaatggcagggcatcggtgtaattgctttcctgcatcagttgcatcgcctgctgcgctttcagctcttcttcgcgcggcagcactttatccagcagggcgcggatcgcctcttccggttgcggcccctggaagccatctaccggttgcccgttctggaacagatacacggtcggaatcgcacgcagaccaaactgcgcggcaatcatctgctccgcgtcgcagtccagcttcgccagaataaattgcccgttgtactgcgccgcgaggctttccagaattggggttaactgcaaacagtgctggctacgttcagaccaaaaatagaacagcaccggagtggtcatgctctgttcaagaacctgttgcaggttagattcgttaatgttgacaatattttctacggacatggagtcgctctctgttgtcgatattttctttgacatgggggcttaagcgcgcgcttcaactcacccctgcaatattttgtccatcacgcgccccggcagcaggcgcttaagcaccattaccgcccaggtcaccagcgtcaccggatagcgcatcttcggcttctcgctaataaaagcatggcgtactttgtccaccaccgcttccggtcccaacgtaaagcgggcggcgatgccgggattttcgactggtttatcactttgcgtctggttgacgttgtcggtgaagcgagtacgaatgggaccgggttcgatcaggctgactttaattccgctgtggcgcagctccatgcgcagtgcatcactccacgcctccagcgcatatttactggccgcgtaagcgccacgacccggcgtggagattaatcccatcacgctacttgtcatcacaatacgcccttcaccgtgcggtaacatcgcgggtaacaggcgcatggtgagctggtgtgcgccgaaaaagttggcggaaaactgctgttccatctgcgcacggctgatggtggaaagggggccatacatgccgaatccggcattgttaaagatcccatacagacaattatcggtcagggcgatcacctcgtcggctgcgcgatcaacactttctggactatccagatcgatcaacacgccggtaaatcccatgctgttcatgcgctcaacatcatccggtttccggcaacctgccagcacatgaaaaccctggcgttttaattcgagcgcgctttccaggccaattccactggaacatccggtaattaagacgcttttttgcataactttacctgtcaggatctccgttgctttatgagtcatgatttactaaaggctgcaacttatttaactgtcatgatttactaaaggctgcaactgcttcgccatccagtcggcaataaacggctgggcgtcgcggttgggatgaataccgtcatcctgcatccattgtggcttgaggtagacctcttccataaaaaagggcagcagcggaacatcaaactctttggcgagtttggggtaaatggcgctaaaggcttcattataacggcgaccatagtttgcaggcagacgtatttgcattaacaatggttcagcgttggcggctttgacatcctgcaaaatctggcgcagcgtttgctcggtttgctgtggctgaaaaccacgcaaaccgtcattgccgcccagttcaaccagcacccaacgcggctgatgctgtttcagcagagccggaaggcgcgccagtccttgttggctggtgtcgccgctgatgctggcattaactacgctcgttttactctgccacttatcattcaacaaggcaggccaggccgcgctggcagacattcgatacccggcgctcaggctatcacccagaatcaataacgtgtccgctgcggcggcacggaaggttaacaggaccaggaacaggaagggcaaatgccagcggaaaacattgttgaagttcatcatcttaagaagtccgtcggtcagggggagcatgaactctccatcctcaccggagttgagctggttgtcaaacgtggcgagaccatcgcactggtgggcgagagcggaagcggtaagagtaccttgctggcgatcctcgccgggcttgatgacggcagcagtggcgaagtgagtctggtgggacaaccgctacataatatggacgaagaagcgcgggcaaagttgcgcgcgaagcacgtcggctttgtttttcagagttttatgttaattcctacccttaacgcgctggaaaacgtcgagcttccggctctgctgcgcggtgagagtagcgcggaaagtcgtaacggggcgaaagcgttgctcgaacagttagggctgggtaaacgtctggatcatcttccggcacagctttccggcggtgaacagcaacgagtggcgctggcacgagcctttaatggtcgacctgatgtgctgtttgccgacgaacccaccggcaaccttgaccgccagacgggcgataaaattgccgacctgctgttttccctcaaccgtgaacatggcaccacgttgattatggtgacccacgacctgcaactggcggcacgctgcgaccgctgcttacggctggtgaacgggcagttgcaggaggaagcatgattgcacgttggttctggcgcgaatggcgtagcccgagcctattaattgtctggctggcgctaagcctggcggtggcctgcgtgctggcgctgggcaatatcagcgatcgcatggagaagggcttaagccagcaaagccgtgagtttatggcgggcgatcgggcgttgcgcagtagtcgcgaagtgccgcaagcgtggctggaggaagcgcaaaagcgcggcctgaaagtcggcaagcagctgactttcgccacaatgacctttgcaggcgacacaccgcagctggcgaacgtcaaagcggtggatgatatctacccgatgtatggcgatctgcaaactaatccccctggcctgaaaccgcaggcgggcagcgtattgctggccccacgcctgatggcactgcttaacctgaaaacgggcgacaccattgacgtgggcgatgccaccttgcggattgccggagaagtgattcaggaaccggattccggttttaaccccttccagatggctccgcgtctgatgatgaatctggcggatgtcgataaaaccggagccgtgcagccggggagtcgggtcacctggcgttataaattcggcggcaacgagaaccagctcgacggctatgagaaatggttgttacctcagcttaaacccgaacaacgctggtacggtctggaacaggacgaaggcgcgctggggcgaagcatggaacgcagccaacagttcctgctgcttagcgcgcttctgaccttgctgctggcagtggcagcggtggcggtagcgatgaatcattactgtcgcagtcgctacgatctggtggcgatcctcaaaacgctgggggcagggcgagcgcaactgcgtaagctaatcgtcggtcagtggttgatggtgctgacgcttagtgccgttaccggtggggccataggcctgttgttcgaaaacgtgttgatggtgctgctcaagcccgttctgcctgctgcactaccgccagccagcctctggccgtggctgtgggcgcttggcaccatgacggtcatcagcctgctggtggggctacgaccatatcgcttgttgctggcaacgcagcctttacgcgtattacgtaatgatgtggtagcgaacgtctggccgctgaagttttatctgccgattgtcagtgtggtggttgtgctgctgctcgccggattaatgggtggcagcatgctgctttgggcggtgctggcgggcgcggtagtactggctttgctgtgcggtgtgctgggctggatgctgctgaatgtacttcgccgcatgacgctgaaaagcctgcctctgcgcctggcggttagccgcctgttacgtcagccgtggagtacgttaagtcagcttagcgcatttagcctctcctttatgctgctggcactgctgctggtgttgcgtggcgatctgctcgaccgctggcagcagcagctacctccagaaagcccgaactactttttaattaacatcgccacagaacaggtagcaccgctaaaagcgttcctcgcggaacatcagatagtcccggaaagcttttatccggtggtgcgggcgcggctgacggcgattaacgataagccgacagaaggtaatgaagatgaggcgcttaaccgcgaactcaatcttacctggcaaaatacgcggcccgatcataatccgattgtcgccggtaactggccgccaaaagccgatgaagtgagcatggaagaggggctggcgaaacgcttaaacgttgccctcggtgataccgtgacttttatgggcgatacccaggagttccgcgctaaagtgaccagcctgcgcaaagtggactgggaaagtctgcggcctaatttctattttattttccctgaaggggcattagacgggcaaccgcagagctggcttaccagtttccgctgggagaatggcaacggcatgttgacacaactcaaccgccagttcccgaccattagcctgttagatattggcgcgattttaaaacaggtcggtcaggtgctggagcaggtaagtcgggcgctggaagtgatggtggtactggtcaccgcctgcggtatgttgctgttgctggcacaggtgcaggtgggaatgcgtcagcgtcatcaggagctggtggtgtggcgcacactcggtgcggggaaaaaactgctgcgtaccacgttgtggtgtgagttcgccatgcttgggtttgtttccggcctggtggccgcaattggtgcggaaacggcgctggcagtgttgcaggcgaaagtgtttgattttccgtgggagccagactggcgattgtggattgttctgccgtgcagcggagcgctgctgctgagccttttcggcggctggctgggtgcgcgactggttaagggtaaggcgctgttcaggcagtttgcggggtgatgagagtccctcattaccgcgccttaacccattccgccacttccgcccactcaccgcgaaagacaactttttccgcttttttctcaagctgatagcgatacatcgggtcgtaatattcttcaagtaacggcaccagccaggccagatgaccgtcggtgctgccggtggtgagttgcgttgtcagtgctgcatccagccttgcagccagttcgttatagcgctgtagccccagccgacgcttaatcgcgctaagtccgtgatgcaggtattcgcaatactcctgccagccctgttcgtcgccgtacgcgtgggtaaaatcatgatgcatacgcaagaaatactcttcgttcaggcgctcaagacggatctcaaacggatcttctaccaccgcaatcgccgcctgagtcattcgctcgcgcaggcattccggcaggtgattgctaccgatcatccggctttcgtcttccagcacccacaggcgcaaattctgacgggcgtcggtttttagcatttcggcagccagcaggttttcaaaactcgcctggctaagttgtggttgtaacgtgcgaccaaacgcgctaccgcgatgacgcgccaacccttccagatcaacaccgttcggctgttgctgcactaacagcgttttaccgctgccggtacaaccgccaatcagcactatcggtttttgtgccagttcaatagtcgcctgaatcgcggtctggcgcagtgccttataaccgccttccaccagcggataatcaatccccgctgcatgcaaccagctttgcacaatatgactgcgctgaccgccacgggcgcagcagagaataccttgcggattttgcaggcacgctgcccgccaggcgtccatgcgctgctgacgaatttcacccgccaccagtttatgtcccagcgccagcgctgcgtcactgccttgctgtttatagcaggtgccaacggcggcgcgttcatcgttattcattaacggcagattgatagcggcgggcattgcgccgtgctcaaactcgataggggcgcgaacatcaataatgggcgtatcagcaatcagcagggcacgatagtcctgttccgtgtgtctctcttgcatagttaaaagtgaacctcaaatcagcttgcgcgctattttacgcgccaacgcgcaaggaaacttgatttttaactgcgtgggttgccgaaaatttctaaaaatccgctgatttccggcctgcgctgggtaaacaaggtcacaatatcttctaccgctttgccgctgccaaatttgcgccatgccagactcaatgggctaggagggcgcatcgttgggattacccggctgaccagttgttgattatcgatcatactctggcaaaggctttttggcaaaaaaccaatgccaacgcccgccagatgggcggcgattttcgtttccatatcgggaacaataatctctttttgccctggcaatcgccaggcgacgcgtttggttaaggtgcgggcgctgtcttcaatattgaccgccggaaagcgccgcaactgcgcttctgttagcggctcttcaacgttcgccagcggatgatccgccgccatgacaaagcgccattgcacgcttcctaagggatcaagactaaaggtatttgccagcgcctcagttcccgtgacgccgatagccaggctaaaaccttcgtacaataggctgtcccagacgcccatatagatttgtcgggagatgtgaaactgggtaaaggggtaacgctcattcagccacgccagcaactgggcgacggcctgggggttgtagagcaggttgttgatgacaatattcacctggcgttccacgccatcattcacctgttgcagctcgcttggcatactttccagccagctcagccagtctctggcctgggaaagtagatgctcgccagccgctgtcaacgtcacgctgcgagtcgtacggaaaaacagcgctactccggtattctcttccagaagtttaatgcgataactgatcgtcgccgtggttttacataatcgttctgccgctttactaaaacttcctgtttcagcaaccgcaatgaaagtccgcaaggtttctggatcgaacatcttcaggtatccccttttaaatccgcaagttgcgtgattttcttatcctctgatttatcagtatttttacatgataaccctgttcaatttgtggactaaatctagttttggaaaaatattccaacttttgtattgatgttgttctcttaaggttttagattgcctgttattgaaaccaagctgaccggtcggcggtggttgaacggaattatgttacaaggacaaaaagatgaaacttcaggtattaccgttaagtcaggaagcctttagtgcttatggcgacgtaatcgaaacgcagcaacgggattttttccatattaacaatggcctggtggagcgttaccacgatttggcgctggttgagattcttgagcaagactgtacgcttatcagcattaaccgcgcgcaaccggcgaatctgccgctgaccattcacgaactcgaacgtcatccgctgggtactcaggcctttatcccgatgaaaggtgaggtgtttgtggtggtcgtggcgttaggtgacgacaaaccagacctgagtacgctgcgggcgtttatcaccaacggcgaacagggagtgaattaccatcgtaacgtctggcatcacccacttttcgcctggcagcgcgtcaccgattttctgaccatcgatcgcggcggcagtgacaactgtgatgttgaaagtattcctgaacaggaactctgttttgcgtgacgcctgcaaccgacttgcataagataaactaattgttcattgtttatgctcacttgtaggtcggagttaacgtaggtatgacggaagttagacggcgcggcaggccaggacaggcggagcctgtggcacagaagggcgcacaggcgttagagcggggaattgcgattctgcaatatttggaaaaaagtgggggaagtagcagcgttagcgatatttctctcaatctggatttgccgctctccacgacctttcgcttgctgaaggttttacaggcagcggattttgtctatcaggacagtcaattaggctggtggcatataggattaggtgtctttaacgtcggtgcggcgtacatccataaccgcgatgtcctctccgtcgccgggccgtttatgcgccgcctgatgttactttccggcgaaacggtcaatgtcgcgatccgtaacggcaatgaagcggtattaattggtcagttagagtgtaaaagcatggtcaggatgtgtgcgccactgggcagtcgtctgccactgcatgcttccggtgcgggcaaagcgctgctttatccgctggcggaagaggagttgatgagcatcattctgcaaaccggtttgcagcagtttacgccaactacgcttgtggatatgcccaccttgctgaaggacctggaacaagcgcgtgaactgggctataccgtagataaagaagagcatgttgtaggtctgaattgcatagctagtgcaatttacgatgatgtcggtagtgttgttgccgctatctccatctccgggcctagtagtagactgacagaagatcgttttgtcagtcagggtgagctggtcagagacaccgcccgcgatatcagcacggcgttgggactgaaagcacatccataatgtctgtcgcatcccgctctgcggagcgggtttttttgacaaaatttgaaagttggaaaaattttccaataaatagaggtaggaataaaatggcaaaaatgagagccgttgacgcggcaatgtatgtgctggagaaagaaggtatcactaccgccttcggtgttccgggagctgcaatcaatccgttctacagtgcgatgcgtaagcacggcggtattcgtcacattctggcgcgtcatgtggaaggtgctagccacatggcggaaggttatacccgcgcaacggcagggaatatcggcgtatgtctggggacttccggtcctgcgggcacggacatgatcaccgcgctctattccgcttctgctgattccattcctattctgtgcattaccggccaggcaccgcgcgcccgtctgcataaagaagattttcaggccgtagatattgaagcaattgctaaaccggtcagcaaaatggcggttacagttcgtgaagcggcgctggtgcctcgcgtgctgcaacaggcatttcacctgatgcgttctggtcgtccgggtccggtactggtggatttaccgttcgacgttcaggttgcggaaatcgagtttgatcctgacatgtacgaaccgctgccggtctacaaacctgctgccagccgtatgcagatcgaaaaagctgtagaaatgttaatccaggccgaacgtccggtgattgttgccgggggcggggtaattaatgctgacgcagctgcactgttacaacagtttgctgaactgaccagcgttccggtgatcccaacgctaatgggctggggctgtatcccggacgatcatgaactgatggccgggatggtgggtctgcaaaccgcgcatcgttacggtaacgcaacgctgctggcgtctgacatggtgtttggtatcggtaaccgttttgctaaccgtcataccggcagcgtagagaaatacaccgaagggcgcaaaatcgttcatattgatattgagccgacgcaaattggtcgcgtgctgtgtccggatctcggtattgtctctgatgctaaagcggcgctgacactgctggttgaagtggcgcaggagatgcaaaaagcgggtcgtctgccgtgtcgtaaagaatgggtcgccgactgccagcagcgtaaacgcactttgctgcgcaaaacccacttcgacaacgtgccggtgaaaccgcagcgcgtgtatgaagagatgaacaaagcctttggtcgcgatgtttgttatgtcaccaccattggtctgagtcaaatcgctgcggcacaaatgctgcatgtctttaaagaccgccactggatcaactgtggtcaggctggtccgttaggctggacgattccggctgcgctaggggtttgtgccgctgatccgaaacgcaatgtggtggcgatttctggcgactttgacttccagttcctgattgaagagttagctgttggcgcgcagttcaacattccgtacatccatgtgctggtcaacaacgcttatctggggctgattcgtcagagtcaacgcgcttttgacatggactactgcgtgcaactcgctttcgagaatatcaactccagtgaagtgaatggctacggtgttgaccacgtaaaagtagcggaaggtttaggttgtaaagctattcgggtcttcaaaccggaagatattgcgccagcctttgaacaggcgaaagccttaatggcgcaatatcgggtaccggtagtcgtggaagttattctcgagcgtgtgaccaatattagcatgggcagcgaactggataacgtcatggaatttgaagatatcgccgataacgcagcggacgcaccgactgaaacctgcttcatgcactatgaataagggagataaataatgttacgtttctctgctaatttaagcatgttatttggagaatatgattttctcgcccgttttgagaaagctgcgcagtgtggttttcgcggcgttgaatttatgtttccttatgactacgacattgaagaattaaaacatgtgctggcgagtaataaactcgaacatacgctgcacaatttaccggcgggtgactgggcggcgggggagcgcggtattgcctgtattcctggccgtgaagaagagtttcgggatggcgtagcagcagcgattcgttatgcccgtgcgctgggtaataaaaaaattaactgtctggtcggtaaaacgccggctggtttcagcagtgaacagattcacgcaacgcttgtagaaaacctgcgttatgccgcgaatatgctgatgaaagaagatattttattactgattgaacctattaaccattttgatattcctggtttccatctcaccggaactcggcaggcgctgaaattgattgatgatgttggttgctgcaatttgaaaattcagtatgacatttatcatatgcagcggatggaaggtgaattaaccaacaccatgactcagtgggctgataaaattggtcacctgcaaattgccgataatccgcatcgcggcgaaccgggaaccggagaaattaattatgattatctctttaaggtaatcgaaaattctgactacaacggttgggttgggtgtgaatataaaccccaaaccaccacggaagccggtttacgctggatggatccgtaccgttaaaacgtaacgctattcagacaatgcttttttaggccgctaagttggcaggggatcgtgttgtctgaattcaggaaaagcgaaatttaaaagaggttaattatgaaactgggatttattggcttaggcattatgggtacaccgatggccattaatctggcgcgtgccggtcatcaattacatgtcacgaccattggaccggttgctgatgaattactgagtctgggtgccgtcagtgttgaaactgctcgccaggtaacggaagcaagcgacatcatttttattatggtgccggacacacctcaggttgaagaagttctgttcggtgaaaatggttgtaccaaagccagcctgaagggcaaaaccattgttgatatgagctccatttccccgattgaaactaagcgtttcgctcgtcaggtgaatgaactgggcggcgattatctcgatgcgccagtctccggcggtgaaatcggtgcgcgtgaagggacgttgagcattatggttggcggtgatgaagcggtatttgaacgtgttaaaccgctgtttgaactgctcggtaaaaatatcaccctcgtgggcggtaacggcgatggtcaaacctgcaaagtggcaaatcagattatcgtggcgctcaatattgaagcggtttctgaagccctgctatttgctagtaaagccggtgcggacccggtacgtgtgcgccaggcgctgatgggcggctttgcttccagtcgtattctggaagttcatggcgagcgtatgattaaacgcacctttaatccgggcttcaaaatcgctctgcaccagaaagatctcaacctggcactgcaaagtgcgaaagcacttgcgctgaacctgccaaacactgcgacctgccaggagttatttaatacctgtgcggcaaacggtggcagccagttggatcactctgcgttagtgcaggcgctggaattaatggctaaccataaactggcctgatacccgcaataaaaatggccgatatcagaaaatgaatcggccagcaatattaaaaaagaaagcagccaaagatgttgctagtgtattaaaaataatatttttattttatttgttcctcatagctagattaaaacaacgttatagcatacgtgaaattaagagggatttatggaacatcagagaaaactattccagcaacgcggctatagcgaagatctattgccgaaaacgcaaagccagcggacctggaaaacatttaactattttaccttatggatgggtagcgttcataacgttcccaattatgtgatggtcggcggcttttttattctcggcttgtctacctttagtattatgctggcaattatcctcagcgcctttttcattgccgcggtaatggtattaaacggtgctgcgggcagtaaatacggtgtgccttttgccatgatcctgcgtgcttcttacggtgtacgtggtgcactgtttcccggattattaaggggcggaattgccgccatcatgtggtttggtttgcaatgttacgcggggagtctggcctgcttgattctgattggcaaaatctggccgggatttttaactctcggtggtgatttcactctgttaggcctttctctaccgggcttaattactttcttaatcttctggctggtcaacgttggtataggttttggcggtggcaaagttttaaataaattcactgccattcttaacccgtgcatctatatcgttttcggcggtatggcgatttgggcgattagtctggtcgggatcggtccaatctttgactacattccgagcggtattcagaaagcagaaaacggtggcttcctgttcctggtggtgattaacgcggtagttgcggtctgggcggcaccggcggtgagcgcatccgactttacgcaaaacgcccacagctttcgtgagcaggcgctggggcaaacgctgggtttagttgtggcctatattctgtttgcggtcgccggggtatgtattattgccggagccagtattcactacggcgctgatacctggaacgtgctggatattgttcagcgttgggacagcctgttcgccagcttctttgcggtactggttattctgatgacaactatctccactaacgcgaccggtaatattattccagccggttatcagattgccgccattgcaccgacaaaactgacctataaaaacggcgtactgattgccagtattatcagcttgctgatctgcccgtggaaattaatggaaaatcaggacagcatttatcttttcctcgatattatcggcggaatgcttggtccggtaattggtgtcatgatggcgcattattttgtggtgatgcgcggacaaattaatcttgatgaactgtataccgcacctggcgattataaatattacgataacggttttaacctcactgcgtttagtgtaactctggtggccgttattttatctcttggcggtaagtttattcactttatggaaccgttaagccgtgttagttggtttgtcggcgtcatcgtcgcctttgcggcctacgccttattaaagaaacgtacaacagcagaaaaaacaggagagcaaaaaaccataggttaattaatcccgatattgaacattgagttaaaaaccaatctgtattttacaaggagtttgttatgtcttttgatttaatcattaaaaacggcaccgttattttagaaaacgaagctcgcgttgtagatatcgccgttaaaggcggaaaaattgctgctatcggtcaggatctgggcgatgcaaaagaagttatggatgcgtctggtctggtggttagcccgggcatggttgatgcgcacacccatatttctgaaccgggtcgtagccactgggaaggttatgaaaccggtactcgcgcagcggcaaaaggtggtatcaccaccatgatcgaaatgccgctcaaccagctgcctgcaacggttgaccgcgctagtattgaactgaagttcgatgccgctaaaggcaagctgactattgatgcggcacaactcggtggcctggtgtcttacaacatcgaccgtctgcatgagctggatgaagtgggcgttgtcggcttcaaatgcttcgttgcgacctgtggcgatcgcggtatcgacaacgacttccgtgatgtaaacgactggcagttcttcaaaggtgcgcagaagctgggcgaactgggtcagccggtgctggtgcactgcgaaaacgcgctgatttgtgacgaactgggcgaagaagcgaagcgtgaaggtcgcgtaaccgctcatgactatgtggctagccgtccggtatttaccgaagtggaagcaattcgccgcgtactgtatctggcgaaagttgctggttgccgtctgcacgtttgccacgtcagcagcccggaaggtgttgaggaagtgactcgtgcacgtcaggaaggtcaggacgttacttgtgaatcctgcccgcattactttgtactggataccgatcagttcgaagaaatcggtactctggcgaagtgtagtccgccgatccgcgatctggaaaaccagaaaggcatgtgggaaaaactgtttaacggtgaaatcgactgcctggtttccgaccactctccatgcccgccggaaatgaaagccggtaacatcatgaaagcatggggcggtatcgccggtctgcaaagctgcatggacgtgatgttcgatgaagcggtacagaaacgcggtatgtctctgccaatgttcggcaaattaatggcgactaacgcagcagatattttcggtctgcagcaaaaaggccgtatcgccccaggaaaagatgccgacttcgtcttcattcagccgaatagcagctatgttcttaccaatgacgatctggaatatcgccacaaagtcagcccgtatgttggccgtaccattggcgcgcgtatcacgaaaaccatcttacgtggtgatgtgatttacgacattgaacagggcttccctgttgcgccgaaaggtcaatttatccttaaacatcagcagtaaaagcttgagcacgtgttgacaattaatcatcggcatagtatatcggcatagtataatacgacaaggtgaggaactaaaccatgtcacatctcgcagaactggttgccagtgcgaaggcggccattagccaggcgtcagatgttgccgcgttagataatgtgcgcgtcgaatatttgggtaaaaaagggcacttaacccttcagatgacgaccctgcgtgagctgccgccagaagagcgtccggcagctggtgcggttatcaacgaagcgaaagagcaggttcagcaggcgctgaatgcgcgtaaagcggaactggaaagcgctgcactgaatgcgcgtctggcggcggaaacgattgatgtctctctgccaggtcgtcgcattgaaaacggcggtctgcatccggttacccgtaccatcgaccgtatcgaaagtttcttcggtgagcttggctttaccgtggcaaccgggccggaaatcgaagacgattatcataacttcgatgctctgaacattcctggtcaccacccggcgcgcgctgaccacgacactttctggtttgacactacccgcctgctgcgtacccagacctctggcgtacagatccgcaccatgaaagcccagcagccaccgattcgtatcatcgcgcctggccgtgtttatcgtaacgactacgaccagactcacacgccgatgttccatcagatggaaggtctgattgttgataccaacatcagctttaccaacctgaaaggcacgctgcacgacttcctgcgtaacttctttgaggaagatttgcagattcgcttccgtccttcctacttcccgtttgccgaaccttctgcagaagtggacgtcatgggtaaaaacggtaaatggctggaagtgctgggctgcgggatggtgcatccgaacgtgttgcgtaacgttggcatcgacccggaagtttactctggtttcggcttcgggatggggatggagcgtctgactatgttgcgttacggcgtcaccgacctgcgttcattcttcgaaaacgatctgcgtttcctcaaacagtttaaataaggaggacaatcatgaaaaagcctgaactcaccgcgacgtctgtcgagaagtttctgatcgaaaagttcgacagcgtctccgacctgatgcagctctcggagggcgaagaatctcgtgctttcagcttcgatgtaggagggcgtggatatgtcctgcgggtaaatagctgcgccgatggtttctacaaagatcgttatgtttatcggcactttgcatcggccgcgctcccgattccggaagtgcttgacattggggaattcagcgagagcctgacctattgcatctcccgccgtgcacagggtgtcacgttgcaagacctgcctgaaaccgaactgcccgctgttctgcagccggtcgcggaggccatggatgcgatcgctgcggccgatcttagccagacgagcgggttcggcccattcggaccgcaaggaatcggtcaatacactacatggcgtgatttcatatgcgcgattgctgatccccatgtgtatcactggcaaactgtgatggacgacaccgtcagtgcgtccgtcgcgcaggctctcgatgagctgatgctttgggccgaggactgccccgaagtccggcacctcgtgcacgcggatttcggctccaacaatgtcctgacggacaatggccgcataacagcggtcattgactggagcgaggcgatgttcggggattcccaatacgaggtcgccaacatcttcttctggaggccgtggttggcttgtatggagcagcagacgcgctacttcgagcggaggcatccggagcttgcaggatcgccgcggctccgggcgtatatgctccgcattggtcttgaccaactctatcagagcttggttgacggcaatttcgatgatgcagcttgggcgcagggtcgatgcgacgcaatcgtccgatccggagccgggactgtcgggcgtacacaaatcgcccgcagaagcgcggccgtctggaccgatggctgtgtagaagtacttgccgatagtggaaaccgacgccccagcactcgtccgagggcaaaggaataatctggcccctgcaatgcccgtccttgcggcgggcattctccggttaaggtgtgtttatgttcaattttgcagtcagccgcgaaagcctgttaagtggatttcagtggtttttctttattttttgcaacacggttgtggttcctcctacgctactttctgcttttcagttgccgcaaagtagcctgcttacgctcacgcaatatgcttttcttgctaccgcactggcctgcttcgctcaggcgttttgcggtcatcgtcgcgctattatggaagggccaggtggcctgtggtggggaaccatccttactatcacccttggtgaagcaagccgcgggacaccgatcaacgatatcgccaccagcctggcagtggggattgcactctccggcgtgctgacgatgttgattggttttagcggattaggccatcgcctggcacggttatttacgccgagcgtgatggtcttgtttatgttgatgctgggcgcgcagctgaccactatctttttcaaaggtatgctcgggctgccgtttggcatagccgacccgaattttaaaattcagttaccgccgttcgcgctcagcgtggcggtgatgtgcctggtactggcgatgattatcttcctgccgcaacgttttgcccgttatggcctgctggtcggcaccataaccggctggttgttgtggtacttttgctttccttctagccacagcctctccggtgagttgcactggcagtggttcccgctcggcagtggcggtgctttgagcccgggaattattctgacggcggtgattacaggtctggtaaatatcagcaatacctacggtgcgattcggggcacggatgttttttatccgcagcagggcgcagggaatacgcgttatcgtcgtagctttgtggcgaccggatttatgacgctgataaccgtaccgctggcggtaattccatttagtccgtttgttagttccattggtttattaacccagactggcgattacacgcggcgtagctttatttatggcagcgttatttgcctgctggtggcgctggttcctgcactcacgcgactgttttgcagtatccctttacccgtgagtagtgcggtcatgctggtttcttatctgcctttactcttttccgcgctggtgtttagccagcaaataacgtttaccgctcgcaatatttatcgactcgcattgccgttatttgtcggcatatttttaatggcattaccgcctgtgtatctgcaagaccttccattaacgcttcgtcctctgctcagtaacggcttattggtcgggattttactggctgttcttatggataaccttattccgtgggaacgcatcgaataatttgttgaaaaaggattgataatgaagattgtcattgcgccagactcttttaaagagagcttaagtgcagaaaaatgttgtcaggcaattaaagccgggtttagcaccctctttcccgatgcgaactatatctgtttgccgatagcggatggcggcgaagggacggtggatgcgatggtcgccgcgacgggcggcaacatcgtgacgcttgaagtctgcgggccgatgggcgaaaaagtgaatgctttttatggccttaccggcgacgggaaaacggcggtgattgagatggcggcagcaagtggcctgatgctggtcgcgcctgaaaagcgtaatccgttgctggcctccagttttggtacgggggagttaattcgtcatgcgctggataacgacattcgccatattattctcggcattggcggcagtgcgacggtcgacggcggtatgggcatggcgcaggcgctcggtgtgcgtttccttgatgccgacggtcaggcgctggcggcaaacggtggtaatttagcgcgcgtggcaagcattgagatggatgaatgcgatccgcgtctggcgaattgccatattgaagtagcatgtgacgttgataacccgctggtaggggcacgcggcgcggcggcggtgtttggcccgcaaaaaggggcaacgccggagatggtcgaagaacttgaacaggggctgcaaaattacgcccgtgttttacaacagcaaactgaaattaatgtctgccagatggcgggcggcggcgctgcgggcggtatgggtattgcggcggcggtatttctcaatgcggatattaaaccgggcattgaaattgtgttgaatgcggtcaatcttgcgcaggcagtgcagggcgcagcactggtgattaccggggaagggcgcatcgacagccaaacggcaggcggtaaagcgccgctgggtgtggcgagcgtggcgaagcagtttaatgtaccggtgattgggattgctggcgtattgggtgatggcgtggaagtggtgcaccagtacggcattgacgcggtattcagcattttgcctcgtctggcacctttagccgaagtgctcgccagcggtgaaaccaatctcttcaacagcgcgcgaaatattgcctgcgccattaaaataggtcagggaattaaaaactaacccttacctttaaagcggatgcgatttatatcgcataagagtgcagtactcatgccggatgcggcatgagtaccatatccttcctgaaaatcgcgcaaattctatatattgcagagatcatgtaggcctgataagcgaagcgcatcaggcaatgttacaaaaaaagccacggtataaaccgtggcaaaatccaacatagctaaaaataatcaggcgagtggtatgacttaaatctctacgtcgcggttacaatctttgctgtaaatatagctgaacgcttcaccacgccctacaccataaccagcctgtaaagaataagcgcccataaagatgtaatcgccttttttcaccgggatccagttattgtcgaggttataaaccccctgaccggaaagaatataggcaccgtgttcctgaacgtgtgtttcgatataaccgtggctggcacctggtgcaaaagagaggatatgcatgttcatatcaaaacctaactctttgggcagaaaatccagcagaataacatcgtccatgccttcataatgaatgcgttccagttcgctggcattgccagaaaccagccacggtgcatagccttctaccggaacatagcggcgcttatataaaaagatttggctgtcttcggcctgggcgttaacaaacgtcattaaggagcctggcgggcaataaagatagccaccttcgcttaaggcaaatgttttgccttcggctttggcagtgatatttccagagatcacatacaggaacgtttcaatgccttcgccaccgaagccctgttggttgccaccgttttgatgcagtgtgaccagataatcaacaaaagaggcacccagctttggcgtggagaggattgtcgcgtcacaattttcaaagcccggaataatattttttaccagaccatccggggttaacagtgcgaaattaccgtgtttaacaatcgcacggttagccagtaaatcttcgcggtaaccggtgacgttatttaaatatcccatttatgactccttatttctgccaggcaagttgataaagcatgagtgccaacgttttgaccccttcggcaaggtcggtaatattggtgcgttccgccgggttatggctgatcccgttgatgctggggataaaaatcatgcaggttggtacgcgaggcgcgaaaatttgcgcgtcgtgcccggcaccactgtgcatcacccggtaattcagtttttctctttcacacaattctgtcagggtggcgaccagctccttattcatcggcacgggttcttcgtccatccataaatcgatatcaataccaatgtccatttcatcgcaaatcgcccgcatgtcgttttctaactgttgggtgaaatcgcgcagcacggcagcgtcggtatgacgacaatcaatggtgaacgtggttttacccggcaccacatttaccgtattcgggcgcggctctactttgccaaaggtcagaaccagcggatcgcccatccttttcgctttttcgacgctctgatggcaaatgcgactgaaagcgtaaactgtatcacgacgataacccatcggcgtggtgcctgcatggttactttcgccgttcagcgttaccgtataacgacgctgcccgacaattgcattcaccacgccaatactttgcccattactttccagcacacagccctgttcaatatgcagttcaacaaaggctttaatatcctgacgcggagttagtggggcgttcggaagagtaaatccgcaagccttcatcgcatcgacaaaactatttcctttggcatcacagatattccgcacgtcgtcaggattcgccagcccaaaaatatttttactgccccagaagacatacgggaagcggctgccttcttcttctgccatcgccaccacttcgaccgtacgtagcggcgcgccgtattgcgttttcagccagtcaattgccagccacgccgccagcgcgccgaattgcccgtcaaggttaccgccgttaaccacggtatcgatatggctaccgctcagaaccacttcctgtggatattcggtgccattcaggcgaccgtataaattccccacttcatcgaaacgtgtttccagcccgcttgctgccattctttttttaaattgctgctgggtttccagccattccgggctataaagtaaacgggtcatcccacccgctgggtcagcgccaaaagaggaaagccagggcagcgtttcttctatagcttgacggaaatgtgtaatcataagaaagtcctgtctcaataattattgcgcaaagggatttttcgtttcgtaactcgtgttataaagcgcgtcggaaattaaatactggtaaatatcatcaacaatttcgatgccttcgacggcggctttgcgttgtttaatatcctgatcctgtccgggataataaacctgattaaaaccgggcgcgggggtaatggcatttaattcgcgcatggtctggctaagatgttgacggaataattcgctggaggagaaaaagttcggattaataactatatgtaattgccccaaattacgccctgcgtgtaaatcgtcatacatgctactaacctgtcgcccgaacggtaagccgagtaagacgccactgaggacgtcaatcatcatcatcaggccatacccttttggcccggcggcggggagcagagcatgtaccgcgaacggatcggttgttggtacaccgtttttatcgaccgcccaggtatccgggatagacatattacggctgcgggcgtcgagcacttttccccatgcctgtacggtagtcgccatatcaaaggtaaggatctcgtcgccttctcccggcgcggcaaaggccagggggttagtaccgtagtaaatttccgcgccgccaaacggcaccaccattggatcggactggcacatgctaatgccaatgaatccggcgcgggctgcctgctgcacaaaataagagattgcgccgctgtgacccatccggctgataccgaccaccgcaacgccattttgctgggcggttttgatggcatgttccatacccattttcgccgcgacctgtccggcggcattgtcggcatgtaaaattgcgctgcacggcccggtttcctcaagacgaaactccggttcgcggttggtgccgcctttactaatgcgttccgcgtagtattccacgcgcaccgcgccatgagagtggatccctctggcatcggcgtaaaccaatacttcagccacggttgcagcgtgctcacgttttaacccagcctggcagagtttattctcaattagctggtggagtgtttcccgactgattttcatctgtcttcctttttaacgacggtgtgaagcatgactgcaattaacatacagggaaaatatctggattatgtgatccagacaggcaaaaaaatatagttagaatttatttgataatccgctcacttttaacctgatttttaaaacaacaacgcttattaaaaaataatgagtaatagcctggtggttatttgaattcttttgttaataattcctgtgtgatattcatcaccttatttactcgttgtcatcgataccgtaatcgccacattaacactgctcgtgcaattgccatgggtgcaatttttaaggagttgttatgatccacgcctttattaaaaaagggtgttttcaggatagcgtcagtttaatgattattagtcgaaaactcagcgaaagtgaaaatgttgatgatgtttccgtaatgatgggtacgcccgccaataaagcgttattagataccacaggtttctggcatgacgattttaataacgccacgccgaacgatatttgcgtggcaattcgtagcgaagcggcggatgcggggatcgcgcaggcgattatgcagcagcttgaagaggcgctaaaacaactggcgcaggggagtggcagcagccaggcgttgacgcaggtgcgtcgctgggacagtgcctgtcagaaattacccgatgccaatctggcgctgattagtgtggctggcgagtatgcggcggagctggcaaaccaggcgctggatcgcaacctcaacgtgatgatgttctccgataacgtcacgctggaagatgaaatccaacttaaaacccgcgcgcgggaaaaaggcttgctggtgatggggccggactgcggtacgagcatgattgccggcacaccgctggcttttgctaacgtgatgccggaaggcaatattggcgtcattggcgcttccggtaccgggattcaggagctgtgtagccagattgcgctggcaggggagggaattactcacgcgattggccttggcgggcgcgacctcagccgtgaagtgggcggcatcagtgcgctaacagcgctggaaatgctcagtgcagacgagaaaagcgaagtgctggcatttgttagtaaaccacctgccgaagctgtgcgtctgaaaattgttaatgccatgaaagcaaccggcaaaccgacggtggcgctgtttttaggttataccccggcggtggcccgcgacgagaatgtctggtttgcctccagcctggatgaggccgcacgcctggcttgcctgcttagtcgcgtcacggcgcgacgtaacgcaatagcgcctgtcagcagcggatttatttgcggtttgtataccggcggtacgctggctgccgaagcggcgggattacttgccggacaccttggcgtggaagccgacgatacccatcaacatggcatgatgctggacgccgatagccaccagattattgacctcggcgatgatttctacaccgtcgggcgtccccatccgatgatcgacccaaccttacgcaaccagttaattgccgatctcggcgctaaaccgcaagtgcgcgtgttgctgcttgatgtcgtgattggcttcggtgcgaccgccgatcctgccgccagcctggtgagcgcctggcaaaaagcctgtgccgcgcgtttagataatcaaccactgtatgccattgccacggtgacaggcactgaacgtgacccgcaatgccgcagccagcaaatcgccacgctggaagatgcggggattgcggtcgtgagtagcctaccggaagccaccttgctggcggcagcgttaattcatccgctcagccctgccgcacagcaacacacaccgagtttactggaaaacgtcgccgtgattaacatcggattacgcagctttgcgctggagctacaaagcgccagcaaaccggttgtgcattaccaatggagcccagtcgccggtggcaataaaaaactggctcgtttattagaacgtttgcaataaggggttcccatgtttacatcagtggcgcaagccaatgctgcggttatcgaacaaattcgtcgcgctcgtccacactggctggatgtgcaaccggcttcttcacttatcagcgaactaaacgagggcaaaacactgcttcacgccgggccgccaatgcgctggcaggagatgaccggacccatgaaaggggcgtgcgtgggcgcatgtctgttcgaaggttgggcgaaagatgaagcgcaggcgctggcaatactggagcagggggaagtgaacttcattccttgtcaccatgtgaatgccgtcgggccaatgggcggtattacttctgccagtatgccgatgctggtggttgagaacgtgaccgacggcaaccgggcgtactgcaacctcaacgaaggtatcggcaaagtgatgcgttttggcgcttacggcgaagatgtcctgactcgccatcgctggatgcgcgatgtgttaatgccagtattaagcgcggcgctggggcgcatggagcgcggtatcgatctcacggcgatgatggcgcagggcattacgatgggcgatgagttccatcaacgcaatattgcttcctctgcactgttaatgcgtgcgctggccccacaaattgctcgcctcgatcatgataaacagcacatcgccgaagtgatggatttcctcagcgtgaccgatcagttcttcctcaacctcgcgatggcttactgcaaggcggcgatggatgctggcgcgatgatccgcgcaggcagcatcgtcacggcaatgacccgcaacggcaatatgttcgggattcgggtaagcgggctgggcgaacgctggtttactgcgcctgtaaacactccgcaaggtctgtttttcaccggcttctcgcaggagcaggcgaacccggatatgggcgatagcgcgattaccgaaacctttggtatcggaggtgcggcaatgatcgcagcgcctggcgtaacgcgctttgtcggtgcgggtggcatggaagcggcaagagcggtatctgaagagatggcggaaatttaccttgaacgcaatatgcagttgcagatcccaagctgggattttcagggcgcgtgcctggggctggacattcgtcgcgtggtagaaaccggcattacgccactcatcaataccggtatcgcccataaagaggcggggatcgggcagattggcgcaggcaccgtgcgggcaccgctggcgtgctttgaacaggcgctggaagcactggctgaaagcatgggtattggttgaggaacgcgcaatgacgatcatccatcctctgcttgccagtagtagcgcaccgaattatcgccagtcctggcggttagcgggagtgtggcggcgggcgattaacctgatgacggaaagcggcgaactgttaacgttgcatcgtcagggtagtggtttcggccccggaggatgggtgcttcgccgtgcgcaattcgatgcgttatgcggtggattatgcggcaatgaacgaccacaggttgtggctcaagggattcgcctcgggcgtttcacggttaaacagccacagcgttattgtttgctgcgtattacgccgcctgcgcatcctcaaccacttgcagctgcatggatgcaacgcgcggaggaaaccgggcttttcgggccactggcgttggcggcaagcgatccgctgcctgctgagttacgccagtttcgtcactgttttcaggccgcgctcaatggcgttaagaccgactggcggcactggctgggtaaaggccccggattaacgccgagtcatgatgacacgctgagcggaatgctgctggcggcctggtattatggcgctttagatgcgcgctccggtcgtccgttttttgcctgttccgacaatctgcaactcgttaccacagcggtgagcgtcagttatttacgttatgccgcgcaaggatatttcgccagcccactcctgcactttgttcatgctctgagttgcccgaaacgtaccgctgttgcgattgatagcctgctggcgctggggcatacgagtggggcagatacgctgctggggttctggcttggccaacaattattacaaggaaaaccatgaaaacactggttgtggctcttgggggcaacgccttactccagcgcggtgaggcgctgacggcagaaaatcaatatcgcaatatcgccagtgctgtacccgcgctggcacgcctggcccgttcttatcggttggcgattgttcacggcaacgggccgcaggtggggctgctggcattgcagaatctggcgtggaaagaggtagaaccgtatccgctggatgtgctggttgcggaaagccaggggatgattggctatatgctggcgcagagtttgagcgcacagccgcagatgccgcccgtgacgacggtgctgacgcgcattgaggttagccctgatgatccggcgtttttgcagccagagaaatttattggtccggtttatcagccagaagaacaagaggcactggaagcggcttacggctggcagatgaaacgtgatggtaaatatttgcgccgggtggtggcgtctccgcaaccgcgtaaaattctcgacagcgaagccatcgagttgttgctcaaagaggggcatgtggtgatttgcagtggcggcggcggtgtgcctgtgacggatgacggagcagggagtgaagcagtgattgataaagatctcgccgctgcgttgctcgccgagcagattaatgcagatggactggtgatcctcaccgatgctgatgcggtatatgaaaactggggaacgccgcagcaacgtgccattcgccatgccacaccggatgagttagcgccatttgccaaagccgatggtagcatggggccgaatgtaacggcggtgagtggttatgtcagaagccgtggtaaacccgcgtggattggggcgttaagccgaattgaagagacgctggcgggcgaagcggggacctgtattagcctgtaatcgtaggcattagacatttgtgcctgatgcgacgcttgacgcgtcttatcaggcctacaaccggtgccgcatccggcaattggtgcacaatgcctgatgcgatgcttgacgcatcttatcaggcctacaatgggtaccggatcggtaggccggataaggcgtttacgccgcatccggcaagaatagagcaccagttaaccgaacttactctgcgcccaaatcacgccgctggcatattccggcggcagcagcgggattaaggcttccagcgtcgcagtcagacggcttgtgtcgctgtcggtcaaattcagatgccccactttacgccccggacggacttctttgtcgtaccagtgcagatgcaccagcggcagtttcagccagtcataattcacatcgctaccaatcagattgatcatcacgctcggattattcaccactggttgcggtaacggcagatcggtaatcgcccgcagatgcagctcaaactggctgatgctggcaccgttttgtgtccagtgaccgctgttatgcacacgcggtgccagttcgttgatcaacagaccttgcggggtgacaaaacactccatcgccatcacgcccacatagcccagctcctgcataatcgcgctcagcatctcttcggcttgcgcctgctgctgtgcgttggcctgcggaaaagcgacgctggtgcgcaaaataccgtcctgatgcaggttatgcgtcagcggataaaacacggtgctgccatcaaagccgcgcgcgccaaccaggctcacttcaccagagaagttaatgccctgctcgacaatacattcgccgtaacactctgccggtaactgttcggtttcatttgcgcgtaaacgccattgaccgcgaccgtcataaccaccagtgcgacgcttaacaatcgccagctcacctaaacgatcaaacaccgcaggccactcgctgcgttcggcaagtaactgccacggtgcagtcggcaggtggagcttatcgaaaagctgcttctgagtcagacggtcagcaataatcgggaacacatcgcggttcacaaaggccggatggcgcgccagctcgcgggttaatgcggtttccggccagcgttctatctcagcggtaatcacgctttgttgaaaaggcaccgccgccggttcagcgtccagcccgactggccagacagcaatgcctaacggttcgcctgcctgacgcagcatacggcctaactgcccgttaccgaggacgcaaacctgtttcatgccgcacctcgcgggtccgggttttccagcacttcgtcggtctgggctttgcgccagtcattcagacgctggtgcagttctttatcatgagtcgcaagaatttgtgctgccagtaacgccgcgtttgccgcgccagctttaccaatcgccagcgtacccaccggaatgccgcgcggcatttgtacgatggagtagaggctatcgacaccgctcagtgcggcgctctgtactggcacgcccagcaccggcaccagcgttttggcggcaatcatgcctggcagatgcgctgcgccgcctgcgcccgcaataatcacctgataaccgttctcttcggcgctttcggcgaagctgaacagtttatcgggggtgcggtgagcagaaaccacttcaacgtggtgcgggacattcaggatttcgaagatttcggcggcgaactgcatggtagcccagtcgcttttggaccccatcacgatggcgacacgcgccggattattgcgggaagacatgcgtcttaaaactcctgtggtgcacaactctcggctttagagggcacagagaatagcacggaaagagagcaaggaaaacggttgcgtggctgtgaaatcagcaaagttgcgggttttttaaaacggaaaatgaatcagctcaacgtcatccgccgtgactttcaccatactaccttccgtatgccaggcacccagtaccacgcgaaaagcaggttgctgattggcgataagttcatgcaccgccgggcgatgggtatgcccgtggatcagccattgcacctgatgtttttccatcgcactgaccaccgcgttttggttaacgtccatgatcgccaggcttttactgctgttggcttctttgctgttcgcgcgcattcgcgcggcaatgcgtttgcgcacaaacaacggcagggcgaggaatagcgtctgcagccagggtttgtggaccttggcgcgaaaagcctgataacccgcgtcatcggtgcacagcgtgtcgccatgcataatcaacacccggcgaccataaagttcgagcaccttttcttccggcaataacgtcatgccactttcacgggcaaagcgtttgccgagcagaaaatcacggttgccatgaatgaaataacagggaacgccggaatcggacaccgctttgatcgccgccgccatcttgcgatggagtgggttgggatcgtcgtcgccaatccatgcttcaaacagatcgccaagaatatacagcgcgtcggccttgcgggcttcccccgctaaaaaacgcagaaaaccggcggtgatcgccggttcttccacgcagagatgaagatctgcaataaagagtgtcgccacgattactcgctaacggtcacgctttcaatgataacgtcttcttttggcacgtcctggtgcataccgctacgaccggttgcaacacctttgattttgtctaccacgtccatgccgtcaaccacttcagcaaacacgcagtagccccaaccttgcaggctttcgccagagaagttcaggaagtcgttatcaaccacgttgatgaagaactgtgcagttgcagagtgcggagcctgagtacgtgccattgccagcgtaccacgggtatttttcaggccgttgttggcttcgtttttgatcggttctttggtggctttttgtttcatgcccggttcaaaaccgccgccctgaatcataaagccgttgataacacggtggaaaatggtgttgttgtaaaaaccttcgcggcagtagtccaggaagtttttaactgtttcaggtgctttatcgtcaaaagttttgatgacaatatcgccgtgattggtgtggaaagtaaccatttttgcatcctgttccgtttgattggtgcttcaacccagttcgggtcatatatagggtggtgttatagcataaccgcacgatcggatcatcacgcaatgtatgctgattcgcgcgggaaatatgggtattatacgcaactcaattacccacacatgtctaaacggaatcttcgatgctaaaaatcttcaatactctgacacgccaaaaagaggaatttaagcctattcacgccggggaagtcggcatgtacgtgtgtggaatcaccgtttacgatctctgtcatatcggtcacgggcgtacctttgttgcttttgacgtggttgcgcgctatctgcgtttcctcggctataaactgaagtatgtgcgcaacattaccgatatcgacgacaaaatcatcaaacgcgccaatgaaaatggcgaaagctttgtggcgatggtggatcgcatgatcgccgaaatgcacaaagattttgatgctttgaacattctgcgcccggatatggagccgcgcgcgacgcaccatatcgcagaaattattgaactcactgaacaactgatcgccaaaggtcacgcttatgtggcggacaacggcgacgtgatgttcgacgtcccgaccgatccaacttatggcgtgctgagccgtcaggatctcgaccagctgcaggcaggcgcgcgcgttgacgtggtcgacgacaaacgcaacccaatggacttcgttctgtggaagatgagcaaagagggcgaaccgagctggccgtctccgtggggcgcgggtcgtcctggctggcacattgaatgtagcgcaatgaactgcaagcagctgggtaaccactttgatatccacggcggcggtagtgacctgatgttcccgcaccacgaaaacgaaatcgcgcagtccacctgtgcccatgatggtcagtatgtgaactactggatgcacagcgggatggtgatggttgaccgcgagaagatgtccaaaagcctgggtaacttctttaccgtgcgcgatgtgctgaaatactacgacgcggaaaccgtgcgttacttcctgatgagcggccactatcgcagccagttgaactacagcgaagagaacctgaagcaggcgcgtgcggcgctggagcgtctctacactgcgctgcgcggcacagataaaaccgttgcgcctgccggtggcgaagcgtttgaagcgcgctttattgaagcgatggacgacgatttcaacaccccggaagcctattccgtactgtttgatatggcgcgtgaagtaaaccgtctgaaagcagaagatatggcagcggcgaatgcaatggcatctcacctgcgtaaactttccgctgtattgggcctgctggagcaagaaccggaagcgttcctgcaaagcggcgcgcaggcagacgacagcgaagtggctgagattgaagcgttaattcaacagcgtctggatgcccgtaaagcgaaagactgggcggcggcggatgcggcgcgtgatcgtcttaacgagatggggatcgtgctggaagatggcccgcaagggaccacctggcgtcgtaagtaattgcgctattgccggatgcgagttttcgcatccggttatcgtctgcgccaccacaacattcccatcagtagcatccccggcaaccacacccacatcaattcagaaataatcacctgatgcccgtacggcgtggtgtaacgagacaatgcaaacggcgcgacttttatcacctgccagggagcgaaaaagcgttcatcactccacggccacagccagccaacgcctttaccgccagtggttacgctatccagcaagctgtggcttagcaagctgacggttaaaaacagccagcagcgaatcagcccagccctgaaccatcggcgtccaataaacacacataacagcgggacaacaaacgcaaacaccaggctatgggtaaacccgcgatgaccaaaaacattgccgtaagcaacgccaaatttaaagctcaatacgtcggcgtcgggcagcatcgccaggatgattccggcaaataacagacgcggagggatgactttgctacccaaccctaaaccaatgcataggggaacggcggcgtgcgtaataacggttggcatgatggtcgcttcggcaaaatgtcgatgctatcagcatggatgaacggggcgtagagggcaaaagtctgaaaagagaaccggcctgttgatacaggccgggaaagggatcaggcaacaacctgtacgctgtgacctgcaaaactcactgtctgaccggcgacgattttgcagcgtttgcgcgtttcaaccgcaccgtcgactttcacctggccttcggcaatcgcgattttcgcctgcgcgccgctttcgctccagccttccagtttcagcaagtcgcacagctcaacgtgcggatgtttacctaaagaaaatgtcgccatgttactcatcctgtggatcatgatattcaacgcacgcctgtagcgtgttttcaatcagcgtggcaaccgtcatcgggccaacgccgccgggaacaggcgtaatgtaactggcgcgtttagccgcgtcttcaaacacgacgtcgcccacaactttgccattttccagacggttgatgccgacatcaatcacaattgcgccttctttgatccagtcaccgggaataaagcctggcttgccaacggcaacgatcaatagatcggcattttctacgtgatgacgcagatttttagtgaagcggtgagtcactgtagtggtgcaacctgccagcagcagttccatgctcatcgggcggccaacgatattgcttgcgccaatcaccacggcgttgaggccgaaggtatcaatgttgtaacgctcaagcagcgtgacgataccgcgcggggtgcagggacgcagacgcggcgcgcgctggcacagacgaccgacgttgtaaggatggaaaccgtccacgtctttgtccggatgaatacgttccagcactttgacgttatcaatacccgccggtaacggcagttgaaccagaatgccatcgatggtgttgtcggcattcagcgtatcgataagctccagcagctccgcttcgctggtggtttccgggaggtcataagagcgggagacgaacccgacttcttcacaagccttgcgtttgcttgcgacataaatttggcttgcagggttactacccaccagcacaacggccagtcctggtgcccgcagtccggctgcaatacgcgcctgaactttttgagcaacttcagagcgcacctgctgcgcaatcgttttaccgtcaataatctttgctgccatcagagagaggattccatctgttacgtagatcgaaggggatgcgcctattttgtcagaagcggggcgcgctgtcaggtttcgtttcagatttatcgcgtgaagcgacctcttgcgaaggtgaggcgcaccgtcgctgagactgaaagcttcatttttcgtccatgatggcgttgtaaatctggaactgatttatttccttgtctaaggattaagataatttaagaaatacctgacaatataaaaagaattttcagcctggtaatttaccgcttcaggtctatatttgtgttgaatatattttgcgcggaagtattcatctaacggggctctctattttttagaatagagtgcatattttcaattaagacattcttagaggataaaaaggaatttactactatcagtgtcttaaataaagtaatcggttatatacggatgtggagtcgataaatgagattgaaggaatatatatgaaattaagatttattagctctgcgctggctgccgcactattcgccgctacgggtagttatgctgccgttgtagatggcggtacaattcactttgaaggcgaactggtgaatgctgcctgtagtgtgaatactgacagcgcagaccaggttgtcacactcggtcaatatcgtaccgatattttcaatgctgttggtaatacctctgcattaattccattcaccattcagttgaacgactgcgatcctgttgttgccgctaatgctgccgttgcattttctggtcaggctgatgcaatcaatgataatttattggccattgcatccagtaccaatacaacaacagcaacgggtgtcggtattgaaatacttgataatacatccgcaattctcaaacctgatgggaatagcttcagtaccaaccagaacttgatccccgggaccaacgttcttcatttttctgcacgttataaaggcaccggtacaagtgcaagtgcagggcaagcaaatgctgacgcgacttttattatgagatatgaataatcaaaaccacgttgttttgaattatatatcacgtcttataacaaagtaatgtaccggttgtctgaagcggtatggtggcaatgtaaatcgaaatcatgttcactttgtatcatgccgctttattaaatgaaaagggaatgatgtgttgtaagaaaccaaagcaatcatttctttatattccttatttttgccgtcaggaatacacaaggcgtattaactatgatgactaaaataaagttattgatgctcattatattttatttaatcattagcgccagcgcccatgctgccggagggatcgcattaggtgccacgcgtattatttatcccgctgatgctaaacagactgcggtatggattagaaatagccataccaatgagcgctttctggtcaatagctggattgaaaacagcagcggtgtaaaagaaaagagtttcatcattacaccgccactgtttgttagtgaacccaaaagcgaaaatactttgcgtattatttacaccggtccaccgctggcagcagatcgtgagtctctgttctggatgaatgttaagacgatccctagcgtagataaaaatgcattgaacggcaggaatgttttgcaactggcgattttaagccgcatgaaattatttctccgtccaattcaattacaagaattacccgcagaagcgccggacacactcaagtttagccgatccggtaactatatcaatgttcataatccaagtcctttttatgtcaccctggttaacttacaagtgggcagccaaaagttggggaatgctatggctgcacccagagttaatagtcaaattcccttacccagtggagtgcagggaaagctgaaatttcagaccgttaatgattatggtagtgtaactccggtcagagaagtgaacttaaactaaccgaatcatctgacaatatcagagctaattatgaaaatacccactactacggatattccgcagaggtatacctggtgtctggccggaatttgttatagttctcttgccattttaccctcctttttaagctatgcggaaagttatttcaacccggcatttttattagagaatggcacatccgttgctgatttaagccgctttgagagaggtaatcatcaacctgcgggcgtgtatcgggtggatctctggcgtaatgatgagttcattggtagccaggatatcgtatttgaaagcacaacagaaaatacaggtgataaaagtggtgggttaatgccctgttttaaccaggtacttcttgaacgaattggccttaatagcagtgcatttcccgagttagcccagcagcaaaacaataaatgcatcaatttactgaaagctgtacctgatgccacaattaactttgattttgcagcgatgcgcctgaacatcactattcctcagatagcgttgttgagtagcgctcacggttacattccgcctgaagagtgggatgaaggtattcctgctttactcctgaattataatttcaccggtaacagaggtaatggtaacgatagctatttttttagtgagctcagcgggattaatattggcccgtggcgtttacgcaacaatggttcctggaactattttcgcggaaatggatatcatagtgaacagtggaataatattggcacctgggtacagcgcgccattattccgctgaaaagtgaactggtaatgggagacggcaatacaggaagtgatattttcgatggcgttggatttcgtggtgtacggctttattcttctgataatatgtatcctgatagccagcaagggtttgccccaacggtacgtgggattgcccgtacggcggcccagctaacgattcggcaaaatggttttattatctatcaaagctatgtttcccccggcgcttttgaaattacagatttgcacccgacatctagtaatggcgatctggacgtcaccatcgacgagcgcgatggcaatcagcagaattacacaattccgtatagtacagtgccaattttacaacgcgaagggcgtttcaaatttgacctgacggcgggcgattttcgtagcggtaatagtcagcaaagtagccctttcttttttcagggtacggcactcggcggtttaccacaggaatttactgcctacggcgggacgcaattatctgccaattacaccgcctttttattagggctggggcgcaatctcgggaactggggcgcagtgagcctggatgtaacgcatgcgcgcagtcagttagccgacgccagtcgtcatgagggggattctattcgcttcctctatgcgaaaagcatgaacaccttcggcaccaattttcagttaatgggttaccgctatagcacacaaggtttttatacccttgatgatgttgcgtatcgtcgaatggaggggtacgaatatgattacgacggtgagcatcgcgatgaaccgataatcgtgaattaccacaatttacgctttagccgtaaagaccgtttgcagttaaatgttagtcaaagtcttaatgactttggcagcctttatatttctggtacccatcaaaaatactggaatactagcgatagtgatacgtggtatcaggtggggtataccagcagctgggttggcatcagttatagcctcagttttagctggaatgaatctgtagggatccccgataacgaacgtattgtcggacttaatgttagtgtgcctttcaatgttttgaccaaacgtcgctacacccgggaaaatgcgctcgaccgcgcttatgcctcctttaacgccaaccgtaacagcaacgggcaaaatagctggctggcaggtgtaggtgggaccttactggaaggccacaacctgagttatcacgtaagccagggtgataccagcaataatgggtacacgggcagcgccacggcaaactggcaggccgcttacggtacgctggggggcgggtataactacgaccgcgatcaacatgacgttaactggcagctgtctggcggtgtggtcgggcatgaaaatggcataacgctgagccagcctttaggggataccaatgttttgattaaagcgcctggcgcaggcggtgtacgcattgaaaatcaaactggcattttaaccgactggcgcggctatgcggtgatgctgtatgccacggtttatcggtataaccgtatcgcgcttgataccaatacgatggggaattccatcgatgttgaaaaaaatattagcagcgttgtgccgacgcaaggcgcgttggttcgtgccaattttgatacccgcataggcgtgcgggcgctcattaccgttacccagggcggaaaaccggtgccgtttggaagtctggtacgggaaaacagtaccggaataaccagtatggtgggtgatgacgggcaagtttatttaagtggtgcgccattgtctggtgaattactggttcagtggggagacggcgcgaacagtcgctgcattgcgcactatgtattgccgaagcaaagcttacagcaagccgtcactgttattagcgcagtttgcacacatcctggcagttaaaggaaattatcaataagataatctgcagattattattggcgatggcatgtttgtgtctggcaaacatatcctgggctactgtttgtgcaaatagtactggcgtagcagaagatgaacactatgatctcagtaatatctttaatagcaccaataaccagccagggcagattgttgttttaccggaaaaatccggctgggtaggtgtcagtgcaatttgtccacccggtacgctggtgaattatacataccgtagttatgtcaccaactttattgttcaggaaactatcgataattataaatatatgcaattacatgattatctattaggtgcgatgagtctggttgatagtgtgatggatattcagttccccccgcaaaattatattcggatgggaacagatcctaacgttagccaaaaccttccattcggggtgatggattctcgtttaatatttcgtttaaaggttattcgtccctttattaacatggtggagatccccagacaggtgatgtttaccgtgtatgtgacaagtacgccttacgatccgttggttacacctgtttataccattagttttggtggccgggttgaagtaccgcaaaactgcgaattaaatgccgggcagattgttgaatttgattttggtgatatcggcgcaagcttatttagtgcggcagggccgggtaatcgacctgctggtgtcatgccgcaaaccaagagcattgcggtcaaatgtacgaatgttgctgcgcaggcttatttaacaatgcgtctggaagccagtgccgtttctggtcaggcgatggtgagcgacaatcaggatttaggttttattgtcgccgatcagaacgatacgccgatcacgcctaacgatctcaatagcgttattcctttccgtctggatgcagctgcggcagccaatgtcacacttcgcgcctggcctatcagtattaccggtcaaaaaccgaccgaagggccgtttagcgcgctggggtatttacgcgtcgattatcaatgaggtacggagaatgagaagagtactctttagctgtttctgcgggctactgtggagttccagtggatgggcagttgaccctttaggaacgattaatatcaatttgcacggtaacgttgttgatttctcctgtaccgtaaacacagcggatattgataagacggtagatttaggcagatggcctacgacacaactactgaacgctggcgataccacggcactcgtcccttttagcctgcggctggagggatgtcctccgggtagtgttgcgattttatttacgggaacgccggcatccgataccaacctgctggctctggatgatcccgcaatggcacaaaccgtcgccatcgaattacgtaatagcgatcgctcccggctcgcactgggggaggcgagcccgactgaggaagtagatgcaaatggcaatgtcacactaaacttttttgccaattatcgagcgttagccagcggtgttcggccaggtgtggcgaaagcggatgcgatatttatgatcaattataattaatattatattaattcgtataatttggcgtagtcgataagctctacaatactatgcaaacctagcttgccataaatattagatttatgcgcactaactgttttattgctaagtaataacttatcggcaatttctttattagataatccgctaaccagataacgtaatatggtcacttcacgattagatagcacagtgaccgtactactattcgtactacatttattgctttttatatagttaagcgtttcgctgggaaaaaacgtgtatccggagaggatcatctgaacggcatgaaaaatatcattctgatcattgcatttactgacaaaaccgttagcaccagcttgtatcgctctgccagcataaaagcattcacttttgctacttaaaaataacactttcactgtgctctggatttgtttgatccttttcaggaaggtaaaaccgtctgttccgggcaagtctatatccataatgattaaatcaacaggacgggttcggagataatcgatggttatgcgataatcatccgttttcaggacaatctgcaattcactgtttttttgcaacagaacttcaatagacattctgatgataggatgagtatccataatgatcacgctcgttggtttcatagttaccagtctcataggagcggacaattttccgttaggtcgggaaattgtactttgatacatgaaaatacgggttttcttgattcagacgcgcagcggtgtgcgtttgtttgccgctatagcgaaataaatcagaaaatcagacgcggtcgttcacttgttcagcaaccagatcaaaagccattgactcagcaagggttgaccgtataattcacgcgattacaccgcattgcggtatcaacgcgcccttagctcagttggatagagcaacgaccttctaagtcgtgggccgcaggttcgaatcctgcagggcgcgccattacaattcaatcagttacgccttctttatatcctccataatttcagagtgggacatatttgggacattatcaccaaaaatgtcgtctattttcctcgcatgctctgtcaaatgattaggcgcaaggtgagcatacctacgaaccatttctatggactcccatccgcccatttcctgaagcactgataatgggacgcctgactgaatcagccagcttgcccaggtgtgtctgaggtcatggaaacggaaatcttcctcatttatgcccgtcttatccgtttccgctttgcccttcaccacatcactttttgtcgctgtttggcgagataattcaacggtgtcaggccgtaaaacgccttaaaaacagagataaagtagctcgtgctgctatagccacataattgcgccacctgagtgatatttttgttatccatcaataacatctgtacggcgtaacgcatacgacactctgtgacaatctggctatagctggtattttcgttttttaatttctttttgagcaggctggggcttaaacataggctactggcgacaattcgcagattccagtaatgctgaatatcgctttgaataatgcggcagacgctgtcgcggacgctgctgcgtaagatatacatcagtagggcaataaaccggctttgctcaagaaagttagacaatacggtaaaaagcaatgcgcgcgtcaactccgcttcgcagggtctgctgggttgctgcttgctgtggttggcggctagccggaacacttccggtgtacggctatgacaagcgataaccggggttgccagccggctccagggctttacacaggttaagttcttatttaaaaacaacagataatcgttgatgatgttacggttgatgtgggtgattaatacgtgatttaacgtactgagttcaatgacgttattgttgcacgcgaaggcggccaggtagtttttcggaagggtaaacgtagcatggttattgacgcttacctctacctctttttcggtcaggatcaccacgcaaggttcactgctgctcaattgcatttcgcactcctcagatatcagaaactccgctcaaaggatctatgcttcctgcatgagtgatcggcccgttcgccgataacgatcttctttctttagcacgctttttagcaattaatcttgatggaattctgatgagagcgaaagaggtaagccaggtcgtacccgacttacctggaggagatttaatactcgagaatgccgtgcgcgacgggcaaatagcgcagagagaaatagagagtgtctttaccgcaagaggaacgtttcgctaacaggctggcaatttctgcgtccggtttcggtttcgctgtaaaggttttgcctttgccggcgacaaaaagttcataaacaacgccgctggcaggggcgggactttggcaatcggcgctggcctgtaaataacgttcacgctgttcagcggtcagtttatccacgccgctgccatcctgtacccagacattaacgccggttgctttaacgtgttccagcagttggcgatagccatcggggctcatgtttccggcgaaaaaactactgatataaaccggttttgcactaacatcgctaatcagccgctgcgcgttgtttaaccatgttagcaaaggctgacgggcggcttcgctgcgccagttcaggtcgtcaatttccgcgctgatgtaccagccatccggcgttatgccaggcgcggcgctccataatctggcttgctggagatcggcagccagcaggcgattaagatagctttccagcgctgcggagctctgtttctggtgcataaaaaattccggatcggcgttcagcccgacaataagcttcagaccagcctgttgcgcagctgcggcccgcttaaacaataacgtgcgctgttctggctgggtaaatgcatcgccgtaacgggtccattgcaaaacaagggtatcgaagccttgcaaacgtaactgactcatcagcccctgccactgggtatcggtaacctgactatctcggttttgtggttgccagataatacctttcatcgcaaaggaaaaagggctgaccaaaagcagtgtcagcaatacgaaaatgaacttacgcatttaccagtgcactccaatggtgagaaacgcgttgttgcgctctccgttacgttgattaatcgccttaaaggtatgttgatactcgacgccgagactgactttgtgcggccaggcgtcgtagtgcgtctcgccggtccagatattccagcggaccccgactccgccaagctgcgcgccctgagtgcctttatcacgatagccgttgtcctgaacgtgagcgtaaggctcaatagtctgtccgttagctaccttctgatgccagctgacgcgataatctgccgtccacgcctgaatatcctggcggatatattgcgccgcatcgaggtacaggttttgggcaaaccagccactaccgttcgggtgccattcgtcgctgtatttgccgccattaaagaaactggcgctggcgcgcagcatggtatcggatgcgccattttggccgttcagcggcaactgctgttcgacggcgatgaaaaagatctgatcgcgcagcggcttccagcgcagaccggtgccggacatcggatttttcaccggcatcatcaccccgttttctccggtatcggcaaagacgcggctataaacactgagcaggtcgccttccagcagcatattgcgtccgatgcggtactcggcttccagttgtccgtagctacgatagcttttccctggcgctgcgccgccgacattattgttagcggtactcattgcgccggaacgcaagccgatggaagaatcgaaactgaacgtccagcggcgaccgacctcctcatgcaaacggcggaaattgaagcgttgttgattttgttctggggtcagtggggttatcagcgcctgattatcaatgtcatcaatcaccagccgggcgtagtgctgcgtcgcaggcatgtcatccagacgctggttcacgtaggccagttgtcggatcagtgccggatcgtccggaagccctttatgcgccggttcgagcatttcccggctctgtgcgatatcaccgctatcccacaaggcgtaaccaagcgctgcctgggtgttgctattattcggttccagttccagcgcggcgcgcaaatcactcaccgcggccgggacattatgacgttggcgataaattgtcgcccgcgcaacgtaagcgttggcagaaggcgcaatattgatactgcgcgtgagatcgttcagtgcgagttccggctgaccaggaatgtaacgttgcgcatgcagccaccagtagagggcattgcttcccagtccacgtttttctgcctgttgtagccagcgatcgcgagccgcaccatttcctgccgcctgggcggtattggcagcagcaagcagatcctcattgctcatgtcgtgaagactgattttctgccaggccgccagtgcggtggcgtagtcctcaacctgatacgcctgataggctaccgcacgatgttgccaggcgctcggttgtcgttgttcggcctgaagccatgcatacaacgccacaccgggtagcgtgtcccgataacactttgccagacggttccaggcggcggcatcgtaggaagggctcatatcgcccagcaagcgaactattgccgggcaattatctgcaatacccggcaactgactttgccactgacgttgctccgccagcggtaagggtttgcttaaaatcgccaccttcgccggcgttgccaggtaaggatgactttccagcagagacgccagtcgcgccattaaagtctggctgacacgcgcatcgccctggaaaggatagcgttgcagcaataaatcggcagcttcgcgactctgctcgttctgcatcagttgccaggttagttgatccaggcgggtaagatttgccggttcttgctgatacagcaatcgtgccagacgcagagcttcagccttgttacgggtcgccacgctgacagcataacgctcctcaagcatttcattggcggggagggtggcgagcagtttttgcgctgcgtcgtactgaccttcttttaacagcaccggtagcgtcgcgccaacaacatactggcggttgtcggcaaactgtaccgtataattcgccaacgcctgaacggggttagcgctgtatttagataacagatagagccaacttttctcttgtgcgtccgtggtaaatagtggcttattttcaatgagataatgctggaggcgtgctttttcgccacgataagccagcgcggtcgcgtaagtaatataactctgaggatcggtgaagatcccctgactttgcagtgccaggatccgatcgtccagctgcccggcaagaagcacgtcaaaccactgacggcgttctgccgcgcttaatgtgttctgctggcgtgcttcattgtatagcgtatctgcctgggaccattgtttcaggtagattgcccgttgcagcagatcggttcgcagcgtttttccttccgggcttgcagcaaacgtcgcatcgttcagttgcgctctggcgacaggtaactgtgccagccgcagggcattctgcccgacttcactgcgacaacgcagggtcggcgcagcatcgcacgctttttgctgggcaagcagttcttcaactgtcgtaacgcttttcacttcaaccggaatagccgccagactgcgctcaagtcgggcatctcctgggtgacgtttcagttgatcctcaagcaacagccgcgcccggtcatcatgaccaaaatggcgataggcttccgcaaggtataaagtcagcggaatattatccggcacctgctggtgtatatattcaaattcgcggatggcggttgcttcgtcgttatttttctgtgccttcagcgctttatcgagacggggataaataacaaaatggcgataatcgctcagccccagctcttctgcgctggtgccgatattgtctgcgagtgcgctggtactcaataaagacgtcagcagtaaaccagaccatccgatgacgcgattaaggttattctccttcattttcggactccagttgcgcaacctgttctgtgtttaaacctgctttgagtaatagactttgcatgctaacttgtaattcgcgttgaattgtcaggacgcgatccaacgtttcctggctgataacgccttcggtgaccaaaaacttgccgagcggcagagaactgcgttcatggcgcaataacaacacgttaattgcactacgattaatatgaccgagcgtggtcagtatttcggcgaacaggaactgatgcggcacatattgccgccagatttcaccggcctgctgttccgtgagccactgatgctgaaccgcattgtacaacattgcccgcggatcgtgaccgcgtcggcgtgcataccagtgacgtaaccctgtgacaatttgtccccgcagaacaatgacgtaacgcactttgcgtccgactttacgcgtcagggccgccaggctaaccgggtcaataccatcttcactgccgacaattaactcgtcattttccagacgcagcggcagtaccgcataatgcagcgccacggaggccggcatttcggcaatcaggctggaagggatctgccaggcatcgatggattcccacgccacgccgttttgctctgccagcgcctgtgccagctgctcggcgctaatcagcccctgcatcagcatactaccgcccaggcgtagaccttcgacgcgattacgcagtgctgtatcgagttgttcttcagtgatgacctgattttccagcagaatttgacctaacgggcgcaagctgcgggtatcgccagtcacgctggggaagtcatgcgttgttttatcccacgccacgcgacgtggatcgccgtgttgaagtacctgttttagcgcgcgccagttggccatgaagttaatcaggttgccccagaaaagacgcaggacggaaagcagcccctgcgtcaggccgtagtagccagtaacgaaaatcacccgctgcacgatgcggttaaccatcaaaccaaagtttagccacagcagggtcattaaccatgcgctgccgctgaaaatagaaaggaaatgccaggcatcgggccacaaactttcatacgccagcaacagcaaaagctggatcatcaccagcatcgcgaggaagctgacaaagttactgattgcccctttgcggtcgcgccagagaaagtagttcagcgtcaggctggaggtccatttatgggttttaaagccttggaaaacaatgccgatgatccagcgggatttttgtcgaaccgcagtgctaaaggtatcggggaaatattcgcgcacgcagatcatgttacttgtccgcgcgtgctgtaaaaatttacgctgctcgcgttctttggcttcgtccaccaccggaaaacggacaaaaatttccgtcatacctttttctttcaggcggaagccaatgtcgtaatcttcagtaagactctgcacgtcgaaagcaataccgtcaccgtcagctaacagtgcggtcacggcgcggcggctgaaacaggtgccgacgcctgcgctgggcacttgtccggcgagggcttcacgcaccggaacatctttgccatgcagctcactaaactcatcaatgtaagtcatgctggtgaagtgcgtccattcgcgttcgaacggatacaccgggatctgaatcagatctttacgctcgaccagatagttgaacagacgcaattccatcggactaatcacatcttcggcgtcatgcagaataaaaccagcaaaagcgaaattggcgctacgctcaaattgggtgatggcgtccagcacgttgttcagacagtcggctttgctggtggggccaggacgcgcgcagactaccttatgcacattcgggaagcgagcgcacacttcgtcaacatcacgctgagtatcggggtcgttggggtaggtgccaacaaagatatgatagttttcgtagtcgagcgtggtcgccgccagctcggccatattgccgatgacgcccgtttcattccacgccggaaccataatcgctaacggtttttcatctggtttatacagttcgcggtaactcattcgcgggtagcggcgataaacactcaacttgcgtttaatgcggcgtacccagtagacgacatcaataaaaaaatcgtccagcccgctgatgaacatgatgaccgctaacgttatcgcgattacttttaagccgtagagccaggtagcaaaaacatcaagaagccagtccacacaaaaaccttacattaacgctggttatgtttagggtggcgtatattaaggttttttatgaattgtgacagctttttaccattaataggtatgactattgcggcacgttatttttacactggttataaaagttgccgtttgctgaaggattaagcgggtaatgtgataacaaaccttgtcccccgcgcatcgctcgttaccgcaaccgtgcctttatgcgcgacaacaatgcttttcactatcgccaggccaataccgctaccttcaccttttcgctggcgggaggggtcaacgcgatagaaacggtcaaacaatcgcggtaagtgctcgggcgcaatgggcgtaccggggttttcgacgataacttgcaccaggtgatcgaccgtctgacagcgcactacaattgtctctccggttggcgtataacgcagggcgttgctaagcaggttgcttagcgcccgacgcagcatcagcggatcgcccgcgacctgacacttgtcgccaacaaaccgcaactccacgccgcgatcttccgctaacgcctcgaaaaaatcgaacactttgccgacttcatccgccaggttgagcattttcttttcggggattagctggttgttatcggcctgagcgagaaacagcatatcgctgaccattttcgccattcgcgtcagctcttcgagattagagtagagcacatcttccagctccttctggctgcggctctggctgagggcgatttcggtttgcgttatgagattcgtaattggtgtgcgaatttcgtgagcgatatccgcactgaaattggactggcgggtaaagacatcctcaatacgctcgatcatatggttgaagctcagtaccagctgttccagctcaatgggcacggtctgcgggtcgaggcgaacgtcgagatctttgctggtaatattctggatttgacggctgacgctgcggatcggcgcgtgacctttatgtaccgccaacagtacgataaagacgatcaggatgctgattacgcttgcggtcataataagtttattcatcaaatcatttatgtaatgaagatgaaaatcgatgctaagcgcgatgtagagcgtataaatcggtttgccgtccaccaacgggccaaccggcaagttaatcatccgccagttgctgtgttccatatgcccgtgaccgtggcctggcatcatcatcgtcgggccggaaaggagatacacctcgccaccctgagcgtctttatcgggtatggcgtcacgcgtaaactcgcggatatccggcgcaccgggggagtgatacaccgttttaccctgactatctgccagggaaatcaacacattggaataaccactgacgatatcttccagcgtcattaagcgtcgggcttgcgtttcgtcagggtgatttagtacccgttcaagggtggcgctaatctcttttaaatcattaatatcctgctcggcaaaatgaacttttacactgtggatcatgatccatgcaaaggcgaaaaacgccgcgatggtggccaggctgataaaaaaggtcaggcgggttgccaggctaaacgggcgctgaaatggcttactgaccatccggcacctcaagcatgtaacccacgccgcgcacggtctgaattagcttcggctcaaagtcgttgtcgattttgccgcgcagccgcttcaccgccacatcaatagcattggtatcgctgtcaaaattcatgtcccatacctggctggcgataaggctgcggggcagcacttcgccctgatggcgaaggaagaactccagcagagtaaactctttactggtcaaagtgatgcgcgtgccgctgcgggtgactttgcggctgacgagatcgaccatcaaatcggcaacctgaaactgactttcgataatcaccgccgccccgcgccgcagtaatgtgcgcacccgcgccagcagttcagcaaaagcgaatggcttcaccaggtagtcatctgcccccaactccagccccttgacgcgatgttcaatggtgccaagcgcggtaagcaacagaatcggcatccctttattggcggagcgtaacatgcgcacgatatcccagccgttcacgtccggcagcataatatcgaggattatcagatcataatcaccggtcatcgccagatggtagccattcagcccgttgtcggccaaatcgaccacaaaaccggcttcggttaaccctttggtcaagtattctccggttttcttttcatcttcgacaatcaacagtttcatatttcctccgcatgttgcccgggcaattctagagtagcgggatcagatggcaatcgcttattggcaaaatgacaattttgtcatttttctgtcaccggaaaatcagagcctggcgagtaaagttggcggcataaaatcaccagaaattatgagcctatgtctccttgtaaacttctgccattttgtgtggcccttgcgctaaccggttgtagtctggcaccggattatcagcgtccggcaatgcccgtgccgcagcagttcagtctcagccagaacggcctggttaacgcagcagataactatcagaacgcgggctggcgcaccttttttgttgataatcaggtgaagacgctgattagcgaggcgctggtgaataatcgggatttgcgcatggcgacgctgaaagtgcaggaggcacgggcgcaatatcgtctgaccgatgccgaccgctacccacagctcaatggcgagggcagcggcagctggagcggtaatcttaaagggaataccgccacgacacgggagtttagcaccggccttaacgccagctttgacctcgattttttcggtcgcttaaagaacatgagcgaagccgagcgacaaaattatttagccactgaggaagctcagcgcgcggtgcatattctgctggtttctaatgtcgcgcaaagctatttcaatcagcaactggcgtatgcgcaattgcaaatagccgaagaaacgctgcgtaattatcagcagagttatgcgtttgtcgaaaaacaactgttgacaggtagcagtaatgttctggcgctggaacaggctcgcggggtgatagaaagtacccgcagcgacatcgctaaacgtcagggggaactggcgcaggcgaataatgcattgcaactgttgctgggaagctacggcaagctgccgcaagcgcagacagtaaacagcgacagcctgcaaagcgttaaattaccggcgggattgagcagccaaatcttattgcagcgcccggatattatggaagctgaacacgcgttaatggcggctaatgccaatattggcgctgcacgcgcggcattttttccgtctataagcctgaccagcggaataagcaccgccagtagcgatctaagcagtttatttaacgccagcagcgggatgtggaattttatacccaaaattgagatccccatttttaatgccggacgcaaccaggccaatctggatatcgccgaaattcgccagcagcagagcgtggtgaattatgaacagaaaatccagaacgcctttaaagaagtggcagatgcgctggcattacgtcaaagcctgaacgatcaaattagcgcccagcagcgttatctggcaagcctgcaaattactttgcaacgggcgcgggcattatatcagcacggcgcagtaagttatctggaagtgctggatgccgagcgttctttatttgcaacccgacaaactttacttgatctgaattatgcccgtcaggttaacgaaatttctttgtataccgcacttggtggcggttgacagcaatatactcgtcatacttcaagttgcatgtgctgcgtctgcgttcgctcaccccagtcacttacttatgtaagctcctggggattcactcgcttgtcgccttcctgcaactcgaattatttagagtatgacttttaactccaggagagaataaatgaaaaaagcactgcaagtcgcaatgttcagtctgtttaccgttattggctttaatgcccaggctaacgaacatcatcatgaaaccatgagcgaagcacaaccacaggttattagcgccactggcgtggtaaagggtatcgatctggaaagcaaaaaaatcaccatccatcacgatccgattgctgccgtgaactggccggagatgaccatgcgctttaccatcaccccgcagacgaaaatgagtgaaattaaaaccggcgacaaagtggcgtttaattttgtccagcagggcaacctttctttattacaggatattaaagtcagccagtaacccaggtttaatgagatgaaaaaaatcgcgcttattatcggcagcatgatcgcgggcggtattatttctgcggcaggttttacctgggttgcaaaggcggaaccgcctgcagaaaaaacgagcaccgcagaacgtaaaatcttattctggtacgacccaatgtatcccaatacgcggttcgataaaccaggtaaaagcccgtttatggatatggatctggtgccgaaatatgccgatgaagagagttctgcgtctggtgtgcgcattgacccgactcagacgcagaatctgggggtgaaaacggctaccgtcacgcgcggaccgctgacttttgcccagagtttcccggcgaatgtcagttacaacgagtatcagtatgccattgtgcaggctcgcgctgccgggtttatcgacaaggtgtatccgcttaccgtgggcgataaagtacaaaagggcacaccgcttctcgacctgaccattcctgactgggtggaagcgcagagtgagtatttactgctgcgcgaaaccggcggtacggcgacccagactgaaggcattcttgagcggctgcgactggcgggaatgccggaggcggatattcgccgcctgatcgccacgcaaaaaatccagactcgctttacgctcaaagcgcccattgatggcgtgatcaccgcgtttgatctgcgcgcgggaatgaatatcgccaaagataacgtggtagcgaaaattcagggtatggacccggtgtgggtcactgctgcgatcccggagtctatcgcctggctggtgaaagatgccagccagtttaccctcaccgttccggcgcgaccggataaaacactcaccatccgcaaatggacgctgctacctggcgtggatgccgcgacccgcacgctgcagctgcgtctggaagtcgacaacgccgacgaggcgctaaaaccgggcatgaacgcctggttgcaactcaacaccgccagcgaaccgatgctgctcattccgagtcaagcgctgattgataccggcagcgaacagcgggtgattaccgttgatgccgacgggcgctttgtaccgaaacgcgttgctgttttccaggcaagccaaggcgtcaccgcattacgctctggtctggcggaaggtgaaaaggtggtttccagcggcctgttcctgattgattccgaagccaatatttctggcgcactggagcggatgcgctctgaaagtgctacccatgcgcattgagggaataaccaatgattgaatggattattcgtcgcagcgtggcgaaccgttttttggtgctgatgggcgcgttgtttctgagcatctggggcacctggaccatcattaatacgccagtggatgcgctgccggatctctccgatgtgcaggttattattaaaaccagctatcccggtcaggcaccacaaatcgttgaaaatcaggtgacttatccgctaaccaccaccatgttgagcgtgcctggcgcgaagactgtgcgcggtttcagtcagtttggcgactcttatgtgtatgtcattttcgaagatggcaccgatccgtactgggcgcgtagccgggtgctggagtacctcaaccaggtacagggtaagctgcctgcgggagtcagcgccgagctggggccagatgccacgggtgttggctggatctatgaatatgcactggtggatcgcagcggtaagcacgatctggccgatttacgcagtttacaggactggtttctcaaatatgagctgaaaaccatccctgacgttgcggaagtggcgagcgtgggcggtgtggtgaaagagtatcaggtggttatcgatccccagcgcctggcgcagtatggcatcagtctcgccgaagtaaaaagcgcgctggatgctagtaaccaggaagcgggcggtagcagcatcgaactggcggaagcggaatatatggtgcgcgccagcggctatctgcaaacgctcgacgactttaatcacatcgttttaaaagccagtgaaaatggcgtgcccgtttatctgcgcgatgttgcgaaggtccagattggcccggagatgcgccggggcattgccgaactaaacggcgaaggcgaagtggcgggcggggtggtgatcctgcgatccggcaaaaacgcccgagaagtgatcgccgccgtgaaggacaaactggaaacgctgaaaagtagtctgccggaaggcgtggagatagttacaacatacgatcgcagccagctcattgaccgcgccatcgacaacctcagcggcaagttgctggaagagtttattgtggtggcggtagtctgtgcgctgtttctctggcatgtgcgcagcgcgctggtggcgattattagcttgccgctggggttgtgtattgcttttattgtcatgcacttccagggactgaatgccaatattatgagcttgggtggcattgcgattgccgtcggggcgatggtcgatgctgctatcgtcatgatcgagaatgcgcataaacggctggaagagtggcagcaccagcatcctgacgccacgctggataataaaacgcgctggcaggtgatcaccgatgcgtctgttgaagtggggccggcgctatttatcagtctgctgattatcacgttgagctttatcccgatcttcaccctggaagggcaggaagggcgtctgtttggcccgttggcgttcaccaaaacgtatgcgatggcgggtgcggcgctgctggcgatcgtagtgatcccgatcctgatgggctactggatccgtggcaaaattccgccggaaagcagtaacccgctcaatcgctttttgattcgtgtttatcatccgctgttgctgaaagtactgcactggccgaaaaccacgctgctggtggcggcgcttagcgtgctgacggttctctggccgctcaataaagttggcggggaatttttaccgcagatcaatgaaggcgacttgttgtatatgccaagcacgctgccggggatttccgcagcagaggcggcgagtatgctgcaaaaaaccgacaagctaattatgagcgtacctgaagtggcgcgggtatttggcaaaaccgggaaagcggaaaccgccaccgattctgctccgctggagatggtagaaacgaccatccagcttaagccgcaggagcagtggcggccaggcatgacgatggacaaaatcattgaggaactggataacaccgtgcggctgccggggctggcgaatctgtgggtgccgccaattcgtaaccgtatcgatatgctcagtaccggcattaaaagccccatcggcattaaagtttccggcactgtgctggcggatatcgacgcgatggctgagcaaattgaagaagtagcgcgaacggtgccaggcgtagcttctgcgcttgccgagcggctggaaggtgggcgctatatcaacgttgagattaaccgtgaaaaagccgcacgttacggtatgacggtggcggatgtgcagttgtttgtgacttctgcggtgggcggggcgatggttggcgaaacggtggaagggattgcccgttatccaattaatctgcgttatccgcaaagctggcgcgatagtccgcaggcactgcgccagctgccgatcctgacgccgatgaagcagcaaatcaccctggcagacgtggccgacattaaagtctctaccggaccgagcatgctgaaaaccgagaatgcgcgcccgacgagctggatttatatcgatgcccgcgatcgtgacatggtgagcgtggttcacgatttgcaaaaagcgatagctgaaaaagtgcagttaaaaccgggcaccagcgtggcattctccgggcagttcgagctactggagcgcgccaaccataagcttaaactcatggtgccgatgacgttgatgattatcttcgtgctgttgtatctggcgttccgtcgggtgggcgaagcgttgctgattatcagcagcgtaccgtttgcgctggtgggcggcatctggttgctgtggtggatgggctttcatctttccgtggcgacgggcactggctttatcgccctcgccggggtcgccgccgaatttggcgtggtgatgctgatgtatttacgtcacgccatagaggccgtgccgagcttgaataatccacaaacattcagcgagcagaagctggatgaggcgttatatcacggcgcggtcctgcgcgtgcgcccgaaagcgatgacggtggcggtgattatcgccggtctgctgccgattctgtggggaacgggggctggtagtgaggtgatgagccggattgccgcgccgatgattggcggcatgatcaccgcacctttgctgagcctgtttattatcccggcggcgtataagctgatgtggctgcaccgacatcgggtacggaaataaaagcaggataccccgtttaaccgtgtggattgtgtcttgcgacgatgggcactaaatgttaaaaggtgcccctcaacaaaaaagacacacaggggaaaggcgtgaaaaacgcgagtaccgtaagcgaagatactgcgagcaatcaagagccgacgcttcatcgcggattacataaccgtcatattcaactgattgcgttgggtggcgcaattggtactggtctgtttcttggcattggcccggcgattcagatggcgggtccggctgtattgctgggctacggcgtcgccgggatcatcgctttcctgattatgcgccagcttggcgaaatggtggttgaggagccggtatccggtagttttgcccactttgcctataaatactggggaccgtttgcgggcttcctctctggctggaactactgggtaatgttcgtgctggtgggaatggcagagctgaccgctgcgggcatctatatgcagtactggttcccggatgttccaacgtggatttgggctgccgccttctttattatcatcaacgccgttaacctggtgaacgtgcgcttatatggcgaaaccgagttctggtttgcgttgattaaagtgctggcaatcatcggtatgatcggctttggcctgtggctgctgttttctggtcacggcggcgagaaagccagtatcgacaacctctggcgctacggtggtttcttcgccaccggctggaatgggctgattttgagcctggcggtaattatgttctccttcggcggtctggagctgattgggattactgccgctgaagcgcgcgatccggaaaaaagcattccaaaagcggtaaatcaggtggtgtatcgcatcctgctgttttacatcggtagtctggtggttttactggcgctctatccgtgggtggaagtgaaatccaacagtagcccgtttgtgatgattttccataatctcgacagcaacgtggtagcttctgcgctgaacttcgtcattctggtagcaagcctgagtgtgtataacagcggggtttactctaacagccgcatgctgtttggcctttctgtgcagggtaatgcgccgaagtttttgactcgcgtcagccgtcgcggtgtgccgattaacagcctgatgctttccggagcgatcactagcctggtggtgttaatcaactatctgctgccgcaaaaagcgtttggtctgctgatggcgctggtggtagcaacgctgctgttgaactggattatgatctgtctggcgcatctgcgttttcgtgcagcgatgcgacgtcaggggcgtgaaacacagtttaaggcgctgctctatccgttcggcaactatctctgcattgccttcctcggcatgattttgctgctgatgtgcacgatggatgatatgcgcttgagtgcgatcctgctgccggtgtggattgtattcctgtttatggcatttaaaacgctgcgtcggaaataaggcattcacgctacatccgacaaaacgatgtcaaccatccgaaaccgctctcatccattcgatgagagcggtttttttaattactgcttaaatgcacccgccagagagcgaatatcattgccggttggcgagtaatccccgcatatccggttgtcaggtcaggatggtaaggcacctgctttacactttcgcccgtggtcagtgatggctgcgggcgaatcgtaccagatgttgtcaattaatcgtgttggcacagcgttatgactatcttttcttttatctgccagtgcacagcaaacatctcattctcacgatgaatgatgacctgctgtttattccagctaattatctgatagtccagaaaacctgcatcagtttggatctcacttgccttaaatgcgctctctttggcggaaaatgccagtgtcagcgccagagaaaaggctaaaccgcagtctgcgagtcgctcgtgttccgctggtgtaataatgttgtctgtcaattctcttgcggtttgtacagaaaaaatttcttctatatcaatgccaatcggttgacgagataccacggctaatgccgtagtcccacagtggctaatactgccgtatacctccgcaggccagacaggttggcgtagctcgccgattgcgggcacacatttatagccatattcccgcaaagcataaacagcagcgatccgtccggctaaatgctctgttttacgtttacgtccagcgtgttgcagttgtgcgtagtgcggcagccagagtaaatcctgctcacaaaaattcgccggatcgaactcaacaaaatgcagcgtatgtccggcaaaggggagggaggtatgcgtagttttcatatcgaccatattcgagactgatgacaaacgcaaaactgcctgatgcgctacgcttatcaggcctacatggtcctgcaatatattgaattggcaagatttttgtaggccggataaggcgttcacgccgcatccggcatgaacgacgcgcactttgtcaacaatctgacgttagcatcagaagtgggtgtttacgctcatataccacgtacgtcccggctcgttataggtatacgccccggcaccggcgatatagttggcccctgccaaatcgcccgtggtctgggcattacccgcacgccacaaacgtttgtcgaacagattgtccacgccgccggtcagactgacattcttcgtcacatcccaggtcgcgctcaggccaacaatgctgtaaggactaatttctttggtttccggtccaaccgctggctgacctttatagttgtacttcttcggctgctgcttgccgtaccaggtgaaggtcgtttgcatgctcaaatcttcccgtgcctgccagctcagcgtactgttcaacgtatactccgggatgatgctcaaacggtcgcccgtggttttgttttcactcttcagcatataagtgatgttattggtccacatcaccgtttcgctaaccggtacgtttaagcttccttccagaccttcaaccaccgctttcggcacgttatcccactgatagagatcggtgccgactgcgttttgccctacagccacatagcccgcttcaatcttattgcgataatcgttacggaaccaggtgacgcccgccagccacccgtcgcgtttgaactccagaccaatctctttgttgatgctggtttctgctttcaggtcatcgttaccttgcagatagcagccgcccgcgctggcatagcaaccctgacctttactgtagagaatgtagttcgggttagtctggtacaggctcggcgctttataagcacgggcgatgcccattttcagcgtgaagtcatcgcctaaaccttggcttatgttcagcgccgggctccagttattgccgacaatactgtgatgatcgaaacgcagccccggcgttacgatggtgctgtcagtcagctccatgttgttttcggcaaacaggctgaaaatttctgctttactatacgggctacggtcggtggtactcacgccatcaatagcgccaccggtattcgttccggtcagtgcctgggtgttggaacttaagtccttcatccgttgctgattccactccgtacccagcgtcagcgtctggttaacgaggaaatcaatcggcaggttaacttcgctgtgcagcatcacgtcatcaagatcgatatcgacgaaatcctgtgtcgctttttcgttaaatttcccttcggtaccgcccgccagaccttccggaatacggctgttacgggtgtgttcgtactgcacccagttgctggtggtcacgccgttatcccagccaccgttccaggtcagcgcgtagttctggcgatacagacggttggtttcatcgccatatttgctgcgggtataggaatcggagttggtattctgggtgtcgcccgcatacaggttaccctggcggctgtaacctgcttccagttccaggctttgcaatggcgcgaaatcccagcgcaccacgccattaatatctttgttgattaccccttcgcgcccggctggtaacgtcgtggcatacgttccggcacgcgcggactgatggccctggttgatatcccacgcgtcagcctgggttttgtcgaggttgccatacaaacggaagctgaattcgtcgcccagcggaccggtcaggctaaagttagtgcgtttggtggcaccttcctctttatgttctggcgcattgaaatatgcgtcccaggagccgtgccactcgccgctgccttttttggtaatgatgttaaccacgccgcccgccgcgccgttgccataacgcgcagctgccggaccacgcagaacttcaatacgttcaatcatttcaggtggcacccaggaagtatcaccacgggtatcgcgctcgccacgccagccctgacgcacgctgttacggctgcttaccggcttgccgtcaatcaaaatcagcgtgttttccggacccataccgcgaatatcaatctgtcggttattcccacgctgaccactggtggagttaccggtcaggttaacgcctggcatggtacggatgatcttgctcacatcgcgggcaaccgggtttttgcggatttcatctgcggtgatggtgctaacgccaggcgcctgtaagttctgctcggcggcggtaacgacaatagtatcgtcatgactaacaggagtatcggtcggctcttgtgcctgcgctaccccataaatccccagattgaccaacaaggccagggaatgaatcttcttgttcattgttttattcctgcatttttgccacgaattgcaactgtcgggcatggtcgtcatcaacacgacgcatcccgctaccgcgaaaacctttgatcctgaaagacacgcagtgcagttggttaattaatgtccgcgcttcccacggcgcgccattacgctattgcaaatgcaaatagttatcaataatattatcaatatatttctgcaatcaatgaaaaattgcacagtaaacatggggttatggtgtgacggcgttaaaagtaggaagtgagagctggtggcagtcgaaacatggcccggaatggcagcgtctgaatgacgaaatgtttgaggtcactttctggtggcgtgatccccaaggttctgaagaatacagcacgataaagcgcgtatgggtctacatcactggtgtgaccgatcaccatcagaacagccagccccagagcatgcagcgaattgcaggcactaacgtctggcagtggacgacacaactcaatgccaactggcgcggcagctactgctttattcccaccgaacgcgatgacattttttctgtaccatcccccgatcgcctcgaattgcgcgaaggctggcgaaaactattaccccaggcgatagccgatccgctgaacctacaaagctggaaaggcgggcgagggcacgctgtttctgcactcgaaatgccgcaagcgcctctgcaaccgggatgggattgtccgcaagcgccagaaatacctgccaaagaaattatctggaaaagtgaacggttgaaaaagagtcggcgtgtatggatttttaccaccggcgatgcaacagcagaagaacgcccgctggcagttttgctcgatggcgaattttgggcgcaaagtatgcccgtctggccagtgctgactagcctgacccatcgtcagcaacttcctcccgccgtgtatgtgttgatcgacgctatcgacaccacgcaccgcgcccacgaactgccgtgtaatgcggatttctggctcgcagtacagcaagagttattacccctggtgaaagctattgccccttttagcgatcgtgccgatcgcaccgtggttgccgggcagagttttggtgggctttccgcgctgtatgccggactgcactggcctgaacgctttggctgtgtattaagccagagtggaagctactggtggccgcatcggggcgggcagcaagagggcgtgttacttgaaaagctaaaagctggtgaagttagcgccgaaggtctgcgcattgtgctggaagcgggtattcgcgagccgatgatcatgcgggccaatcaggcgctgtatgcgcaattacaccccataaaagaatccattttctggcgtcaggttgacggcggacatgatgcgctttgttggcgcggtggcttgatgcaggggctaatcgacctctggcaaccacttttccatgacaggagttgaatatggcattcagtaatcccttcgatgatccgcagggagcgttttacatattgcgcaatgcgcaggggcaattcagtctgtggccgcaacaatgcgtcttaccggcaggctgggacattgtgtgtcagccgcagagtcaggcgtcctgccagcagtggctggaagcccactggcgtactctgacaccgacgaattttacccagttgcaggaggcacaatgagccagcatttacctttggtcgccgcacagcccggcatctggatggcagaaaaactgagtgaattaccctccgcctggagcgtggcgcattacgttgagttaaccggagaggttgatagcccattactggcccgcgcggtggttgccggactagcgcaagcagatacgctgcggatgcgttttacggaagataacggcgaagtctggcagtgggtcgatgatgcgctgacgttcgaactgccagaaattatcgacctacgaaccaacattgatccgcacggtactgcgcaggcattaatgcaggcggatttgcaacaagatctgcgcgtcgatagcggtaaaccactggtctttcatcagctgatacaggtggcggataaccgctggtactggtatcagcgttatcaccatttgctggtcgatggctttagtttcccggccattacccgccagatcgccaatatttactgcacatggctgcgtggcgaaccaacgcctgctagcccatttacgcctttcgctgatgtagtggaagagtaccagcaataccgcgaaagcgaagcctggcagcgtgatgcggcattctgggcagaacagcgtcgtcaactgccgccgcccgcgagtctttctccggcacctttaccggggcgcagcgccagcgcagatattctgcgcctgaaactggaatttaccgacggggaattccgccagctggctacgcaacttagtggtgtgcagcgtaccgatttagcccttgcgctggcagccttgtggctggggcgattgtgcaatcgtatggactacgccgccggatttatctttatgcgtcgactgggcagcgcggcgctgacggctaccggacccgtgctcaacgttttgccgttgggtattcacattgcggcgcaagaaacgctgccggaactggcaacccgactggcagcacaactgaaaaaaatgcgtcgtcatcaacgttacgatgccgaacaaattgtccgtgacagcgggcgagcggcaggtgatgaaccgctgtttggtccggtactcaatatcaaggtatttgattaccaactggatattcctgatgttcaggcgcaaacccataccctggcaaccggtccggttaatgaccttgaactggccctgttcccggatgtacacggtgatttgagtattgagatcctcgccaataaacagcgttacgatgagccaacgttaatccagcatgctgaacgcctgaaaatgctgattgcccagttcgccgcggatccggcgctgttgtgcggcgatgtcgatattatgctgccaggtgagtatgcgcagctggcgcagctcaacgccactcaggttgagattccagaaaccacgcttagcgcgctggtggcagaacaagcggcaaaaacaccggatgctccggcgctggcagatgcgcgttacctgttcagctatcgggaaatgcgcgagcaggtggtggcgctggcgaatctgctgcgtgagcgcggcgttaaaccaggggacagcgtggcggtggcactaccgcgcagcgtctttttgaccctggcactccatgcgatagttgaagctggagcggcctggctaccgctggataccggctatccggacgatcgcctgaaaatgatgctggaagatgcgcgtccgagcctgttaattaccaccgacgatcaactgccgcgctttagcgatgttcccaatttaacaagcctttgctataacgccccgcttacaccgcagggcagtgcgccgctgcaacttagtcaaccgcatcacacggcttatatcatctttacctctggctccaccggcaggccgaaaggggtaatggtcgggcagacggctatcgtcaaccgcctgctttggatgcaaaatcattatccgcttacaggcgaagatgtcgttgcccaaaaaacgccgtgcagttttgatgtcagcgtgtgggagtttttctggccgtttatcgcaggggcaaaactggtgatggctgaaccggaagcgcaccgcgacccgctcgctatgcagcaattctttgccgaatatggcgtaacgaccacgcactttgtgccgagcatgctggcggcatttgttgccagcctgacgccgcaaaccgctcgccagagttgcgcgacgttgaaacaggttttctgtagtggtgaggccttaccggctgatttatgccgcgaatggcaacagttaactggcgcgccgttgcataatctatatggcccgacggaagcggcggtagatgtcagctggtatccggcttttggcgaggaactggcacaggtgcgcggcagcagtgtgccgattggttatccggtatggaatacgggtctgcgtattcttgatgcgatgatgcatccggtgccgccgggtgtggcgggtgatctctatctcactggcattcaactggcgcagggctatctcggacgccccgatctgaccgccagccgctttattgccgatccttttgccccaggtgaacggatgtaccgtaccggagacgttgcccgctggctggataacggcgcggtggagtacctcgggcgcagtgatgatcagctaaaaattcgcgggcagcgtatcgaactgggcgaaatcgatcgcgtgatgcaggcgctgccggatgtcgaacaagccgttacccacgcctgtgtgattaaccaggcggctgccaccggtggtgatgcgcgtcaattggtgggctatctggtgagccaaagcggcctgccgttggataccagcgcattgcaggcgcagcttcgtgaaacattgccaccacatatggtaccggtggttctgctgcaacttccacagttaccacttagcgccaacggcaagctggatcgcaaagccttaccgttgcctgaactgaaggcacaagcgccagggcgtgcgccgaaagcgggcagtgaaacgattatcgccgcggcattcagcagcttgctggggtgtgacgtgcaggatgccgatgctgatttcttcgcgcttggcggtcatagcctactggcaatgaaactggcagcgcagttaagtcggcaggttgcccgccaggtgacgccggggcaagtgatggtcgcgagtactgtcgccaaactggcaacgattattgatgctgaagaagacagcacccggcgtatgggattcgaaaccattctgccgttgcgtgaaggtaatggcccgacgctgttttgtttccatcctgcgtccggttttgcctggcagttcagcgtgctcagccgttatctcgatccacaatggagcattatcggcattcagagtccgcgccccaatggccccatgcagacggcggcaaacctggatgaagtctgcgaagcgcatctggcaacgttacttgaacaacaaccgcatggcccttattacctgctggggtattcccttggcggtacgctggcgcagggtattgcggcgcgactgcgtgcccgtggcgaacaggtggcatttcttggcttgctggatacctggccgccagaaacgcaaaactggcaggaaaaagaagctaatggtctggacccggaagtgctggcggagattaaccgcgaacgcgaggccttcctggcagcacagcagggaagtactagtacggagttgtttaccaccattgaaggcaactacgctgatgctgtgcgcctgctgacgactgctcatagcgtaccgtttgacggtaaagcgacgctgtttgttgctgaacgcacacttcaggaaggtatgagtcccgaacgcgcctggagcccgtggatagcggagctggatatctatcgtcaggattgtgcgcatgtggatattatctctccagggacgtttgaaaaaattgggccgattattcgcgcaacgctaaacaggtaaattaatattatttataaacccataattacagaaaataattatgggttttttatttgtttgatttataggtttgatgaatatttctcttaaatagagtgaatgttgcattcagtggaaggaatttacaaacttcagcttcggataattatcaccaactggtaaagtgagcgccgtggagatttccccctattggactcattttcaggttataccccatgagtagtctgaatattaaacagggaagtgacgctcattttcccgattatcctctggcgagccccagtaataatgaaattgatttacttaatctaatcagtgttttatggcgggccaaaaaaacggtcatggcggtcgtttttgcgtttgcctgcgcaggcttgctgatctctttcatcctgccgcaaaaatggaccagcgcggcggttgtcacgcctccagaacctgttcagtggcaagagttggagaaaagtttcactaagcttcgtgtgctggatctggatatcaaaattgatcgtacagaagcatttaacctgtttatcaagaagtttcagagcgttagcttgctggaagagtacctgcgtagtagtccttatgtgatggaccaattaaaagaggcgaaaatcgacgaactggatttgcatcgcgcaattgtcgcattgagcgaaaaaatgaaagcggttgatgacaatgccagtaagaaaaaagatgaaccgagtctgtatacctcctggacgctaagttttaccgcgccaaccagtgaagaggcgcagaccgttttgagcgggtatatcgattatatctctacgttggtggtgaaagagagcctagaaaacgtccgtaataaactggagatcaaaacccagtttgaaaaagaaaaactggctcaggatcgcattaaaacgaaaaatcaacttgatgcaaacattcagcgcctcaattatagtctcgacattgccaacgcggcaggaattaaaaagcccgtttacagtaatggtcaggccgttaaagatgaccccgatttttctatttctctcggtgcagacggtattgaacgcaaactggaaatagaaaaagcggtcactgacgttgcggaactgaacggtgaattacgtaatcggcagtatcttgtcgagcaattaacaaaagcacatgtcaacgatgtgaattttacgccgtttaaatatcagttaagcccgagtttgccagtgaaaaaagacggtccgggtaaggcgattattgtgatcctttccgcgttgatcggcgggatggtggcttgtggtggcgtgctgttgcgctatgcgatggcatccagaaaacaggatgccatgatggcagaccacttagtttaactatttgcggtactaggtgccgttcgtccgagcggcaccacaagcggcgttccggcaactggatcgtcaatgatcatgcagcgcagaccataaatgcgctcaatcagttcagcagtgacaatctccttcggcgctccctgagcaacaattttcccttcccgcaatgcaatcaaatggctggcgtaacgacaggcctgattaagatcgtgcagcaccgccgccagggtatagcctttttcgcggttcagttcgcttaacaactccagcaaatcaatctgatgactgatatccagccaggtcgtgggttcgtcgagcagcataattgccgtttcctgggccagcaccatcgcgatccacgctcgctggcgttgtccgccagaaagggtatccacgctttgatctgccagatgagttattcccgtggcctgcattgctttcgttaccgcttcttcatcctctttgcgccagcgggtaaacagcggttgatgcggataacgtccacgcgccaccagctcctgcacggtgatatcgcccggcgtggtagcattttgcgccaacagaccaatccggcgtgcaacctctttactggcgtaatgttgaatgtgctcgccatccagccagacatgcccatgagcaggcgtcatcaggcggcttaaggtacgcagtaacgtggatttaccgcagccatttggcccgataattgccgtgaagtgaccatcaggtatttctacagtcagattttccgcaacggtatatttgccatatcccagggttaactgttcgccgcgcaaacgggctacactttcggtcattttttgcgagactcctgaattaacaagacgataaggtaaataccgccgaggctgacggtaacgacgccaaccggaagttgatacggcataaacagttgttgggcgcagagatcggccgccagcagtaacagcgccccgcatagcgccgcctgggttagcccccagcgagcggtgccgctaatgcgtcgggcaatgtgcggtgcgactaaagcaataaaggaaatcggcccggcaagcgctgttgccgcagcggtaagcaccactgcaaccagcatcattaacagacggctacgttcgacgctgacgcccagcgcacacgcggtatcatcgcccatttccagcaagcgcatccggcgtaccagtaaggcggcggcaatgagcatcaatataatgatgggtgcggaagggctggtttttgcccacgtcaggccgttgaggcttccggcattccacaaacctgctgttagcgccgtttctaaagacgctttcagcaacagccaggtattaaaggccaccagcatggcgcgaacgccgataccgataataatcaaccgaaaggtgtcgatgccgttgcgccaggcgagcagccagaccagcaggctagtgacaatgccgcccaccattgcactcagcgcgatagccgtcaggtcctgaccaaacagcaccatcgccaccagcacgccgctccacgccccggtgttaaagcccattacgtcagggctgccgagcgggttacgcatcaggctctgaaaaatcgcgccactgacgcccagtgctgcgccaatcaacagcgccatcagcacgcgtggtaaacgccattcggtgaccaccatcgtcatactgcgcggcgcatcgcccatcagcgcggcgaatacctggctggtttccagcgtgacggcaccgctgcgtaatccccagatacctgcaaccacacaggcggaaaccagcagcaaacaggtgatgagtaatcggcgagagacgtaaatcatgcaccacctcgcgttttacgtcgcacgaggaagatcagcaccggtgcaccaataaacgcactgaccacagaaacgcgcagttcgccgggcacaatcacccgcccgatgatatcggcaaacagcagcagggcaggggtagcaagtagcgtgacgggcaggctccagcgatgatcggcacccaccagccaacgcgccatatgcggcatcatcaggccaataaaggcaatcgggccaactattgccgtcgcactaccacaaagcacggtaatcgccagcagaccaatcaactgtgtgcgcgccacgcgactgcccagcgccgtcgcggtgtcgctgccgaggctcaaactgttcagcgcgcgactcagtaatagcgcagttgctccggcgatcagcaccgggatcagcaccacttttaaggtatgtagattgcgaatatccaggctaccggcttgccagaaacgcaactgatcgtagacgtcaggattaagcagggcgatgccgctggtcagtccttccagcaccgccgccagcgccacgcccgccagggttaaacgcaccggacttaactgcccgccgccctgactgccggtaaaggcaacaatcaaactggccaccagcgccccggcgaaggccatcgccagttgttcctgcgcggaagagtaaccaaacagcgccgcacccagcacaatggcaaagctggctccggcgttcacgccaagcaagccggggtcggcaagtgggtttcgggtgagggtttgcattaacgccccggcaaggccaagcgcgccgcctgccagtaaaccggcaagggtacgcggcagccgcgcgtcgagcacgatggtgcagtcggcgctctggcaggtgccggagaaggcctccagcactacggaagcggggagactttttgccccaatgagcaggcttaatgccgtcgcgataatcagtaataacagcaatccgggcacggcaatggcgcgtgtcacggcaacagaaccagacatacgaacttccatgataatgaaattaattatcgttatcgatcttatttggatatgttagcatgtgcagcctaagaataggtatttaaaatatttgatggcaaggcattgtaatgaataaacaatcctggctgcttaacctcagcctgttgaaaacgcacccggcgtttcgcgcagtattcctcgctcgtttcatcagtattgtgtctctgggtttgctcggcgtcgcggtgccggtgcagatccagatgatgacacattccacctggcaggtggggcttagcgtgacgctgaccggcggcgcgatgtttgttggcctgatggtcggcggtgtgctggcggatcgctatgagcgcaaaaaagtgattttgctggcgcgcggcacctgtggcattggcttcattggactgtgccttaatgcactgctgccggagccgagtttgctggcaatctatttacttggtttatgggatggttttttcgcaagccttggcgttacggcgctattggcggcgacaccagcactggtagggcgtgaaaacttaatgcaggccggggcgatcaccatgttgaccgtgcgtctggggagcgtgattagccccatgattggcggtttattgctggcgaccggtggcgtagcctggaactacgggctggcggcggcgggcacgtttattaccttgctaccgttgttaagccttccggcgttgccaccgccaccgcagccgcgtgagcatccgttgaaaagtttactggcaggatttcgttttctgcttgccagcccgctggtgggcgggattgcgctgctgggtggtttattgacgatggcgagcgcggtgcgggtactgtatccggcgctggctgacaactggcagatgagtgcggcacagattggttttctctacgcggcgatcccgctcggcgcggctattggtgcgttaaccagcgggaagctggcacatagtgcgcgaccagggttattgatgctgctctccacgctgggaagcttcctcgccattggtctgtttggcctgatgccgatgtggattttaggcgtggtttgtctggcgctgttcggctggttgagtgcggtcagcagcttgctgcaatacacaatgctgcaaacgcaaaccccggaagcgatgttagggcggattaacggtttgtggacggcgcagaacgtgacgggcgatgccataggcgcggcgctgctgggtggtttgggcgcgatgatgacaccggttgcttccgcaagcgcgagcggttttggtttgttgattatcggcgtgttgttattgctggtgctggtggagttgcgacattttcgccagacgccgccgcaggtgacagcgtccgacagttaatgcttaaaacagcgccttaagcctatccagcacttgcatggcgctgtagtaatccagacggaacgtctcggttcccagcgcataaacctgcttgttttgtactgcaggcaggtgcgcgagcagcggattagcataaatagcatcggcatctttctgatcaccggcgaacaggaatagactctcgccatttaaccctgcagccagattttccccaccaagctgaatgatgtcatggcgtttaccctgactttggctggcatttaaccctgcgggtaacttcgccagcgtaaagccgagttgttccagcatctgcccttgtgcactttctggcgtccagagattggcactgtgtgcagcggcagtatagacaatggcagtgaccggctgcggcggtaatttgatttgctctttcgccgccgccagttgcttatcaaactgcgcaatccgctctgccgcttgtttctcatgcccggtaatttcgccaagttgcgttaacaggctctgccagcttttgtcgtcgtaattgatgattaatgtcggggcgatggtggaaagctgatcatacagtgccagcgcgctatccccgccggttgcgctaattaaaatcagatccggcatttgcgcggcaacggcttcggcgctcggttcgccgatatagagccgttgcagtttgcgttctttcgccaccttgctccactggcgtaaaaagccctggtcatccgcgacgcggttattcggcgtggtcgcgccgctggcgatcaccggagcatcaatcgccagcagactgccggtcagggtgacgctggtggaaacaatacgctgcggctggctttccagtgtatgtgtgccacggctgtcagtaatctgacgcggccagtcagcggcctgaactgcggctattccactaagcaaaagtcctgttaatagaagggcgttgcggtagagcggggcgagtctcacaaatcagcttcctgttattaataaggttaagggcgtaatgacaaattcgacaaagcgcacaatccgtcccctcgcccctttggggagagggttagggtgaggggaacagccagcactggtgcgaacattaaccctcaccccagccctcaccctggaagggagagggggcagaacggcgcaggacatcacattgcgcttatgcgaatccatcaataatgcttctcattttcattgtaaccacaaccagatgcaaccccgagttgcagattgcgttacctcaagagttgacatagtgcgcgtttgcttttaggttagcgaccgaaaatataaatgataatcattattaaagcctttatcattttgtggaggatgatatggatacgagtctggctgaggaagtacagcagaccatggcaacacttgcgcccaatcgctttttctttatgagcccgtaccgcagttttacgacgagtggatgtttcgcccgcttcgatgaaccggctgtgaacggggatagccccgacagtcccttccagcaaaaactcgccgcgctgtttgccgatgccaaagcgcagggcatcaaaaatccggtgatggtcggggcgattcccttcgatccacgtcagcctagcagcctgtatattcctgaatcctggcagagcttctcccgtcaggaaaaacaagcttccgcacgccgtttcacccgcagccagagcctgaatgtggtggaacgccaggcaattccggagcaaaccacgtttgaacagatggttgcccgcgccgccgcacttaccgccacgccgcaggtcgacaaagtggtgttgagtcggttgattgatatcaccactgacgccgccattgatagtggcgtattgctggaacggttgattgcgcaaaacccggttagttacaacttccatgttccgctggctgatggtggcgtcctgctgggggccagcccggaactgctgctacgtaaagacggcgagcgttttagctccattccgttagccggttccgcgcgtcgtcagccggatgaagtgctcgatcgcgaagcaggtaatcgtctgctggcgagtgaaaaagatcgccatgaacatgaactggtgactcaggcgatgaaagaggtactgcgcgaacgcagtagtgagttacacgttccttcttctccacagctgatcaccacgccgacgctgtggcatctcgcaactccctttgaaggtaaagcgaatagccaagaaaacgcactgactctggcctgtctgctgcatccgacccccgcgctgagcggtttcccgcatcaggccgcgacccaggttattgctgaactggaaccgttcgaccgcgaactgtttggcggcattgtgggttggtgtgacagcgaaggtaacggcgaatgggtggtgaccatccgctgcgcgaagctgcgggaaaatcaggtgcgtctgtttgccggagcggggattgtgcctgcgagcagtccgttgggtgagtggcgcgaaacaggcgtcaaactttctaccatgttgaacgtttttggattgcattaaggagcgaggatgagcattccattcacccgctggccggaagagtttgcccgtcgctatcgggaaaaaggctactggcaggatttgccgctgaccgacattctgacgcgacatgctgcgagtgacagcatcgcggttatcgacggcgagcgacagttgagttatcgggagctgaatcaggcggcggataacctcgcgtgtagtttacgccgtcagggcattaaacctggtgaaaccgcgctggtacaactgggtaacgtcgctgaattgtatattacctttttcgcgctgctgaaactgggcgttgcgccggtgctggcgttgttcagccatcagcgtagtgaactgaacgcctatgccagccagattgaacccgcattgctgattgccgatcgccaacatgcgctgtttagcggggatgatttcctcaatactttcgtcacagaacattcctccattcgcgtggtgcaactgctcaacgacagcggtgagcataacttgcaggatgcgattaaccatccggctgaggattttactgccacgccaagtcctgctgatgaagtggcctatttccagctttccggtggcaccaccggcacaccgaaactgatcccgcgcactcataacgactactactacagcgtgcgtcgtagcgtcgagatttgtcagttcacacaacagacacgctacctgtgcgcgatcccggcggctcataactacgccatgagtagcccaggaagcctgggcgtctttcttgccggaggaacggttgttctggcggccgatcccagcgccacgctctgtttcccattgattgaaaaacatcaggttaacgttaccgcgctggtgccacccgcagtcagcctgtggttgcaggcgctgatcgaaggcgaaagccgggcgcagcttgccagcctgaaactgttacaggtcggcggcgcacgtctttctgccacccttgcggcgcgtattcccgctgagattggctgtcagttgcagcaggtgtttggcatggcggaagggctggtgaactacacccgacttgatgatagcgcggagaaaattatccatacccagggttacccaatgtgtccggatgacgaagtatgggttgccgatgccgaaggaaatccactgccgcaaggggaagtcggacgcctgatgacgcgcgggccgtacaccttccgcggctattacaaaagtccacagcacaatgccagcgcctttgatgccaacggtttttactgttccggcgatctgatctctattgatccagagggttacatcaccgtgcaggggcgcgagaaagatcagattaaccgtggcggcgagaagatcgctgccgaagagatcgaaaacctgctgctgcgccacccggcggtgatctacgccgcactggtgagcatggaagatgagctgatgggcgaaaaaagctgcgcttatctggtggtaaaagagccgctgcgcgcggtgcaggtgcgtcgtttcctgcgtgaacagggtattgccgaatttaaattaccggatcgcgtggagtgtgtggatagtcttccgctgacggcggtcgggaaagtcgataaaaaacaattacgtcagtggctggcgagtcgcgcaagtgcctgaaggagagaacacgatggctattccaaaattacaggcttacgcactgccggagtctcacgatattccgcagaataaagttgactgggcctttgaaccgcaacgtgccgcgttgttaatccatgatatgcaggactattttgtcagcttctggggcgagaactgcccgatgatggagcaggtgatcgcgaatattgctgcgctgcgcgactactgcaaacagcacaatatcccggtttattacaccgcccagccgaaagagcagagcgatgaagatcgggcgctgttgaatgatatgtgggggccgggcctgacccgcagcccggaacagcaaaaggtggtggatcgcctgacgccagatgccgacgacacggtgctggtgaagtggcgctacagcgcgtttcatcgttctccgctggagcaaatgctgaaagagagtggacgtaaccagctgattattaccggggtatatgcccacattggctgtatgaccaccgcaaccgacgcatttatgcgcgatattaaaccgtttatggtggcggatgcgctggccgatttcagccgtgacgagcatttgatgagcctgaaatatgtggccggacgttctggccgggtggtgatgactgaagaattactgccagcacctatccccgccagcaaagcggcgctgcgtgaggtgatcctgccgttgctggacgagtccgatgaaccgttcgatgacgacaacctgatcgactacggtctggatagcgtgcgcatgatggcgctggcggcgcgctggcgcaaagtgcatggtgatatcgactttgtcatgctggcgaaaaacccgaccatcgacgcctggtggaagctactctcccgcgaggtgaaataatggatttcagcggtaaaaatgtctgggtaaccggcgcaggtaaaggtatcggctacgccacggcgctggcgtttgttgaggcgggagcgaaagttacaggttttgatcaagcgttcactcaggagcaatatccctttgcgaccgaagtgatggatgttgccgacgctgcgcaggtcgcgcaagtgtgtcagcgactgttagctgaaacggagcgactggacgcgctggtcaatgcggcgggaattttacgcatgggcgcgaccgatcagctcagtaaagaggactggcagcagacttttgcggttaacgtcggcggtgcgtttaacctgttccagcaaaccatgaaccagtttcgccgtcagcggggcggggcgattgtcactgtggcgtccgacgccgcgcacacgccgcgtattggcatgagtgcttatggcgcaagcaaagcggcgctgaaaagcctggcgttgagcgtcgggctggaactggcgggtagcggcgtgcgctgtaatgtggttagccctggctccaccgacaccgatatgcaacgcacgctgtgggtgagcgatgacgccgaagaacagcgtattcgcggctttggcgagcagtttaaactcggcattccgctggggaaaatcgcccgtccacaagagatcgccaacacgattttgttcctcgcctctgacctcgccagccatattaccctacaggatattgtggtcgatggcggcagtacgctgggggcataagcatgatctggaaacgccatttaacgctcgacgaactgaacgccaccagcgataacacaatggtggcgcatctgggaattgtgtatacccgtctgggcgatgatgtgctggaagccgaaatgccggttgatacccgtactcatcagccgttcggtttactacatggcggcgcgagcgcggcgctggcggaaacgctgggaagcatggccggatttatgatgacccgcgacggacagtgtgtggtaggcacagaacttaatgcaacacaccatcgcccggtgtctgagggaaaggtacgcggcgtctgccagccgctgcatcttggtcggcaaaatcagagctgggaaatcgtcgttttcgatgaacaggggcggcgttgctgcacttgtcggctgggtacggcagttttgggatgaacccgacagaattagatgagattgcaggaaaactcggttaacggagtgatcgagttaacattgttaagttaaatattggtttcaactccgatttacatggttgctgtgttgttaaattgtacaaagatgttatagaaacaaaatgtaacatctctatggacacgcacacggataacaactatgaacaaaagtgggaaatacctcgtctggacagtgctctctgtaatgggagcatttgctctgggatacattgctttaaatcgtggggaacagatcaacgcgctgtggattgtggtggcgagcgtctgtatctatctgatcgcttaccgtttttatgggctgtatatcgccaaaaatgtgctggcggttgacccgacgcgtatgacgccagcggtgcgccataacgacgggctggactatgtgccgacggacaagaaagtgctgttcggtcaccattttgcggccattgccggagcaggtccgctggtggggccggtactggcggcgcaaatgggctacctgccggggatgatctggctgctcgctggggtggttctcgccggtgcggtgcaggatttcatggtgctgtttgtttctacgcgccgtgacggtcgcagcctgggtgagctggtcaaagaagagatggggccaaccgccggggtgattgcgctggtggcctgctttatgatcatggtcattatccttgcagtgctggcgatgatcgtggtgaaagccctgactcatagcccgtggggaacatataccgttgcgttcaccattccgctggcgctgtttatggggatctacctgcgctatctgcgtccggggcgtattggcgaagtgagcgtcatcggtctggtattcctgattttcgccattatctctggcggctgggtggcagaaagtccgacctgggcaccgtactttgactttaccggcgtgcagttgacctggatgctggtgggttacggttttgtggcggcggtgctgccggtgtggttactgctggccccgcgtgactacctctctaccttcctgaaaatcgggactatcgtcggtctggcggtaggcattttgattatgcgcccgacgctgaccatgcctgcgctgaccaaatttgtcgatggcactggcccggtatggaccggtaacctgttcccgttcctgtttatcaccatcgcctgtggcgcggtgtctggcttccatgcgctgatctcttctgggaccacgccgaagatgctggcgaacgaagggcaggcgtgctttatcggctacggtgggatgttaatggaatccttcgtggcgattatggcgctggtttccgcctgtatcatcgatccgggcgtgtattttgccatgaacagcccgatggcggtgctggctccggcagggacggcggatgtggtcgcttctgccgcgcaggtggtgagtagctggggctttagcattacaccagatacgctaaaccagattgccagcgaagtgggtgaacagagcatcatttcccgtgcgggcggtgcgccgacgctggcggtggggatggcctacattctgcacggcgcgctgggcggcatgatggatgtggcgttctggtatcacttcgccattttgtttgaagcactgtttattctgacggcggtggatgcaggtacgcgtgctgcgcgctttatgttgcaggatctgctgggcgtggtgtctcctggcctgaagcggaccgatagtctgcctgctaacctgctggcaacagcgctgtgcgtactggcgtggggctacttcctccatcagggcgtggtcgatccgctgggcggcattaacactctgtggccgctgtttggtattgccaaccagatgctggcagggatggcgctgatgctctgtgccgtggtgttgttcaagatgaaacgtcaacgttacgcctgggtggcgctggtaccaacggcctggctgctgatttgtaccctgaccgcaggctggcagaaagcgtttagcccggatgcgaaagtcggcttcctggccattgctaataagttccaggcaatgatcgacagcggcaatattccgagccagtatactgagagtcagctggcgcaactggtgttcaacaaccgtctggatgccgggttaaccatcttctttatggtggtcgtggtggttctggcactgttcagcattaagacggcacttgcggcattgaaagatccgaagccaacggcgaaagaaacgccgtatgaaccaatgccggaaaatgtcgaggagatcgtggcgcaggcaaaaggcgcacactaaagtcagagtgagggggggatgttggcgaatgttggcttagtgcccagggttccctctcaccctaaccctctccccggtggggcgaggggactgaccgagcgcgttgatagcatttgtaggccggataaggcgttcacgccgcatccggcactctttcagcaacatggttagcggaggccaagatgtttgatagtctggcaaaagccggaaaatatttaggtcaggcggcgaagctgatgattggtatgcctgattacgacaactatgtcgaacatatgcgggttaaccatcccgatcaaacgccgatgacctacgaagagtttttccgtgagcggcaggacgcgcgctacggtggaaaaggcggcgcgcgctgctgctaaatttgtacgtcaggctttaaagctttccacttttttgaacgctgcacgcaacgtatctggtgtcagcgtgactggcaggtaatgaatggactccaccggacgcagggtgtgggcaatcactttgtcgatctccgcctgattattgatatccacttccagctccgccagtgtagtcggcagatgaaaacgctgatacgctccagttaattgcgccagcacatcatcctgacccagcaaggcgctttgcaccagaattccgtaggcgactttggtgccgtggagaaacttctcggtttgcggcagcacggtcagaccgttatgcacggcatgagctgccgccacacgcgtaaaacgatcgcccagaccaccaaccatcccaccaccagcaataatagcatccaccacatcgcaaaaactttgcgttaactgttgattttgctgatcgctcagcgcctgttcgctactgtttaacaagacgtcgcgaatggcttgcgcattattgatccccagtcgcacggttagcggcaacgtttctggttgcggagccagcaccaccgcttcataccatttcgccagcgtgtcaccgatccccgccagcagatattgttgcggtgcattgaggataatctccggttccaccagcaccataaaattggcgtcgtcgaaaatctcataatgcagcgcctgtccggcatcattataccagacggagagcggtgtccaggcggcgcaggtggcggcgatcgtcggaacggcaacaaacggcagaccgagacggcgggcgagggctttcgcggtgtcgagcagtgcaccgccaccgacgccaatcaccacgctgcggtcgtcaccggactcagccgccagttgttgtacatcgctttcgctgcaatgaccgcgaaacaaaatatgctttgcccctggcagtccaaacgctggcggaagtttggtttgcgccgcagcaatggcgcgtttgccgtagatccacaccgcgcgagaaagttgttcatcagtgaaaaaatcgtgcaggtgattgaaacttcctggatgactaaagtagttagccgggccgacgaccacgcggataggattgtgaggcatgttgtgttgtccttattgttttatttagacatctaaacgtcttgattgccaaatactagcatcgtgttatagtgccttcaacacgcaacttcgtcaggtacaataaaaatgacaaataaccctctgattccacaaagcaaacttccacaacttggcaccactattttcacccagatgagcgcgctggcgcagcaacaccaggcgattaacctgagccaaggctttcctgattttgatggtccgcgctatttacaggagcggctggcgcaccacgttgcacagggggcaaaccaatacgcgcccatgaccggcgtgcaggccttgcgcgaggcgattgctcagaaaacggaacgtttgtatggctatcaaccagatgccgatagcgatatcaccgtaacggcaggggcgacggaagcgttatacgcggcgattaccgcactggtgcgcaatggcgatgaagtgatttgttttgatcccagctatgacagttacgcccccgccatcgcgctttctgggggaatagtgaagcgtatggcactgcaaccaccgcattttcgcgttgactggcaggaatttgccgcattattaagcgagcgcaccagactggtgatcctcaacactccgcataaccccagtgcaactgtctggcagcaggctgatttcgccgctttgtggcaggcgatcgccgggcacgagatttttgtcattagcgatgaagtctacgagcacatcaactttagtcaacagggccatgccagtgtgctggcgcatccgcagctgcgtgagcgggcagtggcggtttctagttttggcaagacctatcatatgaccggctggaaagtgggttattgtgttgcgccagcgcccatcagcgccgaaattcgcaaggtacatcagtatctgacctttagcgtgaataccccggcacagctggcgcttgctgatatgctacgtgcagaacctgagcattatcttgcgttaccggacttttatcgccagaagcgcgatattctggtgaatgctttaaatgaaagccggctggagattttaccgtgtgaaggtacatactttttgctggtggattacagcgcggtttctaccctggatgatgttgagttttgccagtggctgacgcaggagcacggcgtagcggcgattccgctgagcgtgttttgcgccgatcccttcccacataaactgattcgtctctgttttgccaagaaggaaagcacgttgctggcagcagctgaacgcctgcgccagctttaattatttaaccgtccaggcgcgggaatattgacggtcggcaaacaactcttgcaggccgttaatttgcttcaggcgcagcacttcgtcgctgtccattcccagctctttgccaattttattatcgtcccatcccaactggctaagttcacggacgatttcgctcatggcggtgatttgatggcgtccacgagcgcgattatgacgaatagtcgcggcgatgcgttgattacgcgtaccttccagacaggtcaccggcaaataaccttttaagcgtaattttaaactactactgcctttaccaatttcatggcggtgaaaaccatccacgatttccatggcatttttatccgtatgtgtgaccacaatgggttgggtaaaaccatctatttcaatggatttttgcagcagttttttttcgggtggtgccacgttgtttgggttgtaatcattaggcataagttggctgtttttaacccacagaacgcaatccactggctcttcacgaaaggggctaacctgatggatcgccatgcggatttcattaatcgctttgatgcgatcatcttccggcaagctggcgagaaattgcgttaaatcctgcgttaatcgttgttgcatagtatcccccattcctgacgttttccttttatccgttcgttataacgctgatagttcttgctttttgtggggctaaaacttaatgcccgacaccagtaatcgttattgagtaaaactttgcatatccgccgccaggaggggatatctttcgcgccaatgtccccttgctgggtttgtggaacctcgatgccttttttctgataccagtgcaaataaatggcgattttattgcggtaatgctcagctgttttttccggcatgctattgagcagcaataatgcatattcttgccagtctaaatgttctggcttgaggattttccgatgcccatagaaatgattgtcatgtccggcgtaaatgccgccactttttaccccgctgactcgtgcgcacatagcagcccagcgatccggttcgataacgtgatagagccataatccttgtcgttgctccgggccaaaaggttcgcaaattcgcatatgacgcagaggaacgcctgcctgatacattaggttatacagtgggttgcagagactttgatgatttgcataccaggtccagatatcagccactttccagtcgtaaatggggtaaatgtaccagctatgaccgcctggtgcggccgtagtccagggtttatcgtcggcaaaacgttgtttatttaaactggcgatggcgacaaaacggttgtaggactcatccgcacggatgccgatcatcatcgccgccggacgtttttgactaaaccattcggcaaactcacgtacaaattgttcgaaggtcatgcctggctggtaaaagcagaaaaagtcagggtcggttatcgcatcttggggaggttgacgtacccattcgacatcaggttcccagcactgccattcgggttggtattgactaagggaattttgcgtcgtaagcgggagcgcaacccagtaaaactcttcgatgacatcggtgtacaactcgcgcagggactgaacatagttaatggtgcaagagaattgcgcctcccagtcgataaacaaaacgcagatttttttgcccatttgtcgggcaagttcggctgtcagatgcagcattaaaccagagtctttgccgccagaaaaactgacacaaacgcggggtagggtgttgagtgtccaggtaatacgctctcgtgcagcttccagaatattgagcggaagaggaattttataaatagacatctgaagacgctctctgaacgttacagggtgatcagtgagataagtctgttaattataaagtaaacactgtaaagcagagtgttttatttttcattcgcgctgtgaataaatagatgaaagttatagtagctgtctgtagttatatatcaaaaactctcatttagacggtcaataaatcgggagaacaccaaattatttaaagaagatttattataggaaatgtaaagctttatactaggtaacggatgttctagttttatctcttttaagttaagaaagtcacggtaggaattataaagttcataggggactattcccagtaaatctgtaactgcaatgctattaatgattgtcagcaaagaggaaccacgaaaactgattttgcgattcataaatctctcgtctatttccatttgaatatcatcaacccctgcacttttagatattaattgggtgaactcttctgccataatttgttcataagtgctattgtcagtaattcgtggatgcctattactacaaattagagtattgcgaatcgtatgcaatggcatgcaaatgacggaacggctgatcactggcatttgggtgatcaccagatcggctttgcggtgaaccaacagttcttcagcattctctgcactcatgaggatatcatggcactcaatctcgacagaggaatcttgccgtaggcagcggatcagcatactattattagagcaagaaatgagctgagggccgtagataataaagtttttctttagttcggacttattgactatattaattgtttgttcaaggcctctgagatttttctcaagatggtgatgcagatttaaccctgttgtcgtcggcgcgataccttttccactgcgaatgaataaagggtcattaaattgcgcacgtaagcgttgtaagctctggctcacggcacttggggtgatatatagactttcagcagctttgctaatgcttaaatgctggtaaatacactcaaatatgacaagaagatttaagtcgaactttttcaagtcgtagagattggccatacactactccggttatatttttcttccatgatatattcacttaatcaatgttttttgcgtatatatttttattgattatgtttttttgcttaactcaggattaagtttttctaaaatagcacagccacttagggcagagcgagcaattcatgcttttttaggatggttgaaaagcagggatatagttcaaccatccatgaattaccttttatttattccccataatgatattaagcgttttctgatcgggcaaccccacggcctgttgtagcgtattttccttactcatgtaatagatagccggcgtgacatttgcccccagatcgtccatcagtttctcattgtcacttaacactttcatttgctctgtacttacgtttgcaggcacgtttagcttaagcttgccaccagaggcttcatattgttgccaggtttttgcgggatctttggaggcaagaattgccgctgctgtcgccgggctttctggcttgataaccccaaccaacaatgttcttaattgcactttgccagaatctacccacgggcgcgcctgctgccagaactgtttacaatatgggcagaacggatcggcgaagacgtagacaatgaccggcgcatcttttttaccgtcgaggagccagtgggattgttccatccgttgccacatttcgcgtccggctggtgcgtaaatttctttttcgataagtgtgttactcaggttttcacctttctcgttgtacatgtaaccagagatagcgtgcttaccatctggagtcaggtagatggtgacgcccatatcctgatactttccgagataacctttcattcctccgggggcatcgaatgttttgatgattgtaatgccctgtttttcaatcgcttttactggagcaggaagttcctctgcgaaggcgattgcaggaagcagagccagtaaaagtatcttttttaacattaatttgtccttttcagtcagtgcaaaagtcgagtaaaaggcataacctatcactgtcataggtaagagcttagatcaggtgattgccctttgtttatgagggtgttgtaatccatgtcgttgttgcatttgtaagggcaacacctcagcctgcaggcaggcactgaagataccaaagggtagttcagattacacggtcacctggaaagggggccattttactttttatcgccgctggcggtgcaaagttcacaaagttgtcttacgaaggttgtaaggtaaaacttatcgatttgataatggaaacgcattagccgaatcggcaaaaattggttaccttacatctcatcgaaaacacggaggaagtatagatgtccttgattaacaccaaaattaaaccttttaaaaaccaggcattcaaaaacggcgaattcatcgaaatcaccgaaaaagataccgaaggccgctggagcgtcttcttcttctacccggctgactttactttcgtatgcccgaccgaactgggtgacgttgctgaccactacgaagaactgcagaaactgggcgtagacgtatacgcagtatctaccgatactcacttcacccacaaagcatggcacagcagctctgaaaccatcgctaaaatcaaatatgcgatgatcggcgacccgactggcgccctgacccgtaacttcgacaacatgcgtgaagatgaaggtctggctgaccgtgcgaccttcgttgttgacccgcagggtatcatccaggcaatcgaagttaccgctgaaggcattggccgtgacgcgtctgacctgctgcgtaaaatcaaagcagcacagtacgtagcttctcacccaggtgaagtttgcccggctaaatggaaagaaggtgaagcaactctggctccgtctctggacctggttggtaaaatctaaatttccttcgtctttcacgccatagcggcgttggcgtcgcccgctcaccccggtcacttacttgtgtaagctcccggggattcacaggctagccgccttgctctgacgcgaaatacttcggaaattcacctaattcttcgggtgctgcggcacccgattttcttccccgcaccatgatgcaagctgcatccaggtagccgcagaggccgcttgcatgatgatgtttaaagcccaggagataaacatgctcgacacaaatatgaaaactcaactcaaggcttaccttgagaaattgaccaagcctgttgagttaattgccacgctggatgacagcgctaaaagcgcagaaatcaaggaactgttggctgaaatcgcagaactgagtgacaaagtcacctttaaagaagataacagcttgccggtgcgtaagccgtctttcctgatcaccaacccaggttccaaccaggggccacgttttgcaggctccccgctgggccacgagttcaccagcctggtactggcgttgctgtggaccggtggtcatccgagcaaagaagcgcagtctctgctggagcagattcgccatattgacggtgattttgaattcgaaacctattacagcctctcttgccacaactgcccggacgtggtgcaggcgctgaacctgatgagcgtactgaacccgcgcatcaagcacactgcaattgacggcggcaccttccagaacgaaatcaccgatcgcaacgtgatgggcgttccggcagtgttcgtaaacgggaaagagtttggtcagggccgcatgacgttgactgaaatcgttgccaaaattgatactggcgcggaaaaacgtgcggcagaagagctgaacaagcgtgatgcttatgacgtattaatcgtcggttccggcccggcgggtgcagcggcagcaatttactccgcacgtaaaggcatccgtaccggtctgatgggcgaacgttttggtggtcagatcctcgataccgttgatatcgaaaactacatttctgtaccgaagactgaagggcagaagctggcaggcgcactgaaagttcacgttgatgaatacgacgttgatgtgatcgacagccagagcgccagcaaactgatcccagcagcagttgaaggtggtctgcatcagattgaaacagcttctggcgcggtactgaaagcacgcagcattatcgtggcgaccggtgcaaaatggcgcaacatgaacgttccgggcgaagatcagtatcgcaccaaaggcgtgacctactgcccgcactgcgacggcccgctgtttaaaggtaaacgcgtagcggttatcggcggcggtaactccggcgtggaagcggcaattgacctggcgggtatcgttgagcacgtaacgctgctggaatttgcgccagaaatgaaagccgaccaggttctgcaggacaaactgcgcagcctgaaaaacgtcgacattattctgaatgcgcaaaccacggaagtgaaaggcgacggcagcaaagtcgttggtctggaatatcgagatcgtgtcagcggcgatattcacaacatcgaactggccggtattttcgtccagattggtctgctgccgaacaccaactggctcgaaggcgcagtcgaacgtaaccgcatgggcgagattatcattgatgcgaaatgcgaaaccaacgtgaaaggcgtgttcgcagcgggtgactgtacgacggttccgtacaagcagatcatcatcgccactggcgaaggtgccaaagcctctctgagtgcttttgactacctgattcgcaccaaaactgcataagaagaagtaagattcacctgcaattgcttagccgccggggtcaaacctggcggcttttttatggcattaaaaagccccgccgggatggctccgggcagggcgggatacttattctggcaattaacgcacaaccagcaccggcagattggcgtggcggatcacgctgctggcgttagaacctaacagatgggtgctaatgcttgggttgcgagaaccaataactacaacatcagcccccagttcttctgccaactcattgacttcatcccgcacgctaccaaaacggacatgttgtttaatgcgggaaggatcgatggtgaagtggctgaccatcgtttgcagacgttcttgtgcttcatgttgcagatgctcttcaaaacgacgcacatcagcggcaaaacggtgcaggctcaggctggcactcccgggtagtacgtgaagtagatgaataactccgtcatcctgggcgaggaattcagcgtggcgaacagctttgtcgctcaattccatttcaaatacatcaactggcataatgattgtcttatacataaccctttctccctgttaatcatgaacaaatcattcgccatgattataatatttatccctgatatttgtctggttctttttccttacgaactgtttctgtgatgaatatattctcactgaacaccaggaattctcccaaaacctgtggtaccgcccgttttcccgctgtgatagctacccttaaagactgactcttttttgaactgtctctggaggttgcatgaaagcattgacttatcacggcccacatcacgttcaggtagaaaatgttcccgatccgggcgttgaacaggcagatgatattattctgcgtattacggcaacggcgatctgtggctctgacctccatctttatcgaggcaaaatacctcaggttaaacatggcgatatttttggtcatgaatttatgggggaagtagttgaaaccggaaaggacgtaaaaaatttgcaaaaaggcgaccgagtggtaattccgttcgtcattgcttgtggcgactgttttttctgtcgattgcaacaatatgccgcctgcgaaaataccaatgcgggtaaaggcgctgcgctcaataaaaaacagataccagctccagcggcattgtttggttatagtcacctgtatggcggcgttcctggtgggcaggcggaatatgtccgcgtccctaaagggaatgtggggccgtttaaagtaccgcctttgcttagtgatgataaagcgcttttcctttctgatattctgccaacggcatggcaggcagcaaaaaatgcgcagatccaacaaggtagtagcgttgcagtctatggtgctggtcctgtgggattgttgacaatcgcctgtgcacggttgctcggtgcggaacagatttttgttgttgatcatcatccctaccgcttgcatttcgccgccgaccgctacggcgcgatcccgattaattttgatgaagacagcgatccggcacagagtattattgaacaaacggcaggtcaccggggcgtggatgcagtaatagacgccgtcggttttgaagcgaaaggcagcaccacggaaacggtgctgactaacctgaaactggagggcagcagcggtaaagcgttgcgtcagtgtattgcggcggtcaggcgtggcggcattgttagcgtaccgggcgtctacgctggatttattcacggtttcctgtttggcgacgcctttgataaagggttgagctttaaaatgggacagacccacgttcacgcatggctgggagaattattaccgttaattgagaaaggattactgaaaccagaagaaattgttacccactatatgccgtttgaagaggccgcccggggatatgagattttcgaaaaacgtgaagaggagtgccgtaaggtgattctggtacccggtgcacaaagcgcagaggcggcgcagaaggcggttagtggtctggtgaatgcgatgccggggggaacaatatgatcgtcaggagtggttttcgaggtaaaggacagccatgacgataatcgccgccataatcagaaatcctatcaggatgtaaaatgcttctgccatggttattcccacaaacgaaacggaataattttgcagcaaaagtgaacagtgagaaccaggaaaaattgctgattttgcgtaaagaggatgcgagtgcatcctctgggcaaagcgagttatcgcttgtgcagatgggattaaagcaggtagtcgccagcagcttctggctggtattcgagttccagcacttcaaggtgggttgcaacgccgcccggaagttcccagtgaatggaatcgccaacgcgcagccccagcagtgcggcacctaccggagccataacggaaagctgagtattgctatcggtcatttttgccggatacaccagcgtgcgcacacgcacttcgccatcgctaagattgcggaatttaacccggctgttcattgtcaccacgtcgtgtggcatctcttctgggctacacatttgggcgcgatccaactctgcgtttaacgcgtcggcgattggcaaaccagcataggcgggttgctccagcagaatatcgatgcgttcggcatccaggtcgttaatgatgatagttggtctggacatttttactccatgtcgtcggtgctgcgagtgtcgcagataaacatacccaaaagaaaaccctcaccgtcaggcggcgagggtttaactcacatgatgatactgactgttgctcactctttgaagtgatttgcgtcacattcagggaattcctcaatgcagcgcattatgtataaatcttaatcgccttggtttatggaagacgaattagcgtgttttgtaaatcagatgattaataacccgctttatcaatcacaaaggttttgccacagttacctgggtgaggttgtggcaagaaactgtttgcagaaagcggagcgttgatggcgtcagctttgatgctgatctgaatttcagtcaaatacgcagggttaccctggcacgttagcttaactgctttcacgttctcttttccccagcttttggcaaaggcggcgtcaaagtcacggcggctcactgttttaccgtaattatccgcaaggaattttccggcttcgctctctttaatttcttgattcaggcgtaccatcgtaccgaagtatgcgtccggatcaaaaccaaagcaggcaccgtgtttggcatattcgtagcgttccaggcaggaacgtccgccagctcctggcatgacttcacttagtttagcggccgtttccagacttaatccggtttccgggctactacacattcggctggcgcgcgcttctggtagattcgggattgggcgagtagcgcaaccgaagcgcatccagcggcgttcatcaacaccacgggcagcaacgcttttaggcaatcctggccacagaccatgtacggtcagaaaatcagctttgttggtcgtttcggtttgcaggcgacattcatctcgttcgttacgatttcgatcgtgttgactctggcaaaatccggtttgccaggagagggccaggacatagcgatcaaaatcgccatactgttttgcctgcaacgctaaggcgttggcagaagagaagggaagcagagaaaccgcgagcaacgcggcgttacgccagaatgctttcataatgggtgtggaactcatacatacactgaatactatctattaaatcataaaaaagcccgccaggtgggcttacctggcgggcgtgatgatttattcagcgtttggcgaacgtattagttccacatggcgagaatcggccagccaaccaacagcaacatagagatgtaaatcaccccgaagattgcgccaagacgccagtaatctttacttttcacatagccacagccgtaaataatcaccccaggaccggttgcatacggcgtcagacagcccatgataccgatagacagcaccagcaggatacacagttgttccattggtacgcccggaatacctttaccgacggccagaataaccggcagcatggttgcggtgtgcgcagacaggctggcaaacaggtagtgtgcaaagtagaacaccagaaccagtacaatcaccgttgcgtttggactgaatccttccaggtgcgtactcatggtaccggcgaaccagtcaataaaaccagaacgagtcaggccgttagccatcacaaccagagttgccaggttgaccagtgtgttccatgcgctgttatagcgggtaatgtctttccaaggcacaacgtgcagggccagcattaggctaactgccagcagaccaaccgcagtagcattaatgacttcactgccaaatacccacaaacctaagctgagcaatacaaggccaatcagtgtccactctctgcgtgtcagcgcacccatggttttcagttcatcacccgcccaggttgccacttcttcactgtgtgtgatttccggtttgtacagcacgtaggaaagccacggcgcaatgataagcaagataaccccaaccggcaggaagcagaggaaccactgcaaccagctaatctggataccggcaattttgctgacgaactccagacccagcacgtttggtgccgcaccggtgacaaacatggagctactcagactggtactaatgaccatcatccacatcaaatagccgccaatacgacgcgcggacggatcgttcgggaaacttttaaacaacggcggcaggtttttaatgaccggaaaaaccgtacccccggtacgcgcggtgttggaaggtgtaaacggtgccagcagaatgtcgataatgacaatcgcataacccaacgtcagcgtgcgtttgcccatgaatttcaccaggaaaagggcaatgcgacgacctaacccggaaacttcataccctaatgcaaaaataaatgcgccaaataccagccataccgtggtgctggaaaaaccagccaggccccatttcagcgcctgtttttgcgcattaaacgctgggtcagctaattctttggcatcaaagagcaggtaattactgccaataacgcaaatagtaaccgcaataaaactgatcgctgttgccggaattggctcgaggatcatgccgacaatcattgccacaaacacagcgaagtaatgccatgcctgcggcggcataccgtcggggacagggataagaaacatgacacccatcaccaccagtggggccaatagtttccatatattatcttttgctaaagacatacgggttctccgaaaattaatatttccaaatttatcaagtgcttaaataattaaatctgtgctaaaaaccaggtaaggatcagtaggtcagcactgccgcctggactgagatttcgttcgatacactccctgtcgaactgccggagataatcgagatcggcgggggttcgaatgccccctttttgcaataatgtttgcgcctcgcgctgtagccagcgcaggcccccctcgccaccgcggcttgcaacgttggtatcgccgttgatcgccatcagtaggagcaaggtatcgagcaatgccagttcaggatctaacccctgatccagcagagtgaggtaatgcggcaaggcgtgattgatcaccagtggataacccgcttcggcttcaccgcgtgcgccggtaaggccaagctgttggtacaaccgttgacctgccgtcagttgactattattggtacgcagttcgcgatcggtcaggccacggcagaaacttgccgccgtagaacaaacggttgttggcgttaccggttggttgagttgaagcaaacggccaattgccgcacatagcagccctaaagaaaaaatgctgcctttatgcgtgtttacgcccgcagtggcgcggaacatatcaccttcgcaagccataccaattgggcgtaatccgtggagtaccgcttctggtgccatttccgcactacaggcaccaaattcaatgaaacggggtagccagccctgaatcgccagcgcgctgcggtggaaatcttccagcgccatatctttgtgcgcaccgcagttaatgcgatccacgaggcctggtttcggactcagattgacttcagtcagcatggcgcgccagcccagcagggcgtactcatcgattaaactcgtcgcaagctttgtggttttagtactcgttgcaggcatgctcatcgttcagcagtgcctccatgttatttagttgacgttgcaggcatcgacatcgttcagcagtgcctccatgcggttgagtaaatcggtcagttgatgggtttttccacgcgcgcagacggctgcgctttgttcgcacaacaggcagcggcgaggcggcagactatagtcgcggcgggagagaatttcgccttcgggcgtcaggacatcgatatcccataaccgcccgagaggatgactatgttcaagctcaatggtggcgagcttgaggtcgcgagccggggcggcaatgctcaacatgccctccggcccgctggcggaaaccagtgcagcctgctcctgaatttgccagccctgttttgcggctaaggcacgcaaggctgtcacgccatgattaaaaattcggcgtgtgacctcgctgtctttaatcggcccaggcgcaaccacggtaaaggagaccagtggaacaggatggcgcttgagccagacgtgttgccgtgcttgcctttcatcccggctgacgagcagctcgggaatacttaccgcatggtggctggcgagttcaggaagcaggtgcatggcttattccttcacctgatgcacaacatcgatcacgctgccatcgcggtaacgcacaacggcaacgacgcggtctgtgaattcaatcggctgtggttcaccggtcagcagacgcgcacgttcgcgcagccactcaatggaaaccactttaatgcccgcttcctgcagacgttctgccagttccggacgtgccgggttaactgcgataccgtggtctgtgaccagaatatcgacactggagcctggggtgatgcaggtcagtacgttatccaccagagtcggaatacgaccgcgtaccagcggcgcgacgatgatggaaagcgcagaggcaatcgcggtatcgcagtgaccaccggaagcaccacgcagtacgccgtcagagccggtcagcacgttaacgttgaactgggtgtcaatttccagcgcgctcagtaccaccacgtcgagacgatcaacgcttgcgcctttgctaccccagttagcgtactggttggcgctgatttcgatgtgattggggttacgggccaggctttgcgcagcatggctgtcaaagctctgcacatccagcagtttgcggatcagacctttttcgtgcaggtcaaccatcgtcgcggtaataccgccaagggcgaagtcggcgcgaatatcgcggctacgcattttgtcttccaggaaacgggttaccgccaggcttgcgccgccggtgccggtttgcatggagaaaccttctttgaagtagccagagttgacaatcacatccgcagcgctacgggcaataagcagttcgcgcgggttagtggtcatacgggtcgcgccagcgccgatttttgcagcatcgccaacgcggtcaactttgacgatcaaatcaacctgatcttgctcaatgcttgccggattatgcggataaggcagcagttcttcggtaagcatcacgacctgttttgcgttgtcggcatcaactattgcatagccgagggagccgcagcaggctttaccggtgtagccgttggcattaccgaattcatcacaggacgggacgccgaggaaagccacgtcgatattcagttcgccgctctgtaccagatgcacacgaccgccgtgagagtggatctgcaccggttctgccagcagaccacgggagatctcttccgccagtggaccacgcaggccggaggtataaatgcgggtaaccacgccctggcgaatgtgttctaccagcggcgcatggcaatcactcagggagctggacgccagggtcaggtttttaaagcccatcttcgcgatgacgtccatcaccatattgacggtcaggtcaccgccacggaaagcgtgatggaaggaaaccgtcatgccgtcctgtaaaccagagcgacgaatcgcttcttccaggttggcgcacagtttgcgatcgcgcgctttttcagcctggtaggtttgctttgggctgttctggaaagcggcaagatcgcattcagcgcgacgattccaggccgctacccgttcttgtcgttgagattgttcaattttctgcgtcattttgattgccttattcttcgcggatgccggaaagttctgcacgggagagcaccagacgggcgcgatcgataaccggaccgtccaccatcttgccgttcagggaaaccacgccgaggccttcgcgagcggcggcttcagcggcttctacgacgcggcgggcgtgatccacttctttctgggtcggtgcgtagaggttgtgcagcagatcaatctgacgcgggttgatcaggcttttgccgtcaaagcccagctgtttgatgtgggcggcttcttgcagaaatccggcttcgttgttagcgtcggaatagacggtatcgaacgcctgaatacccgcagagcgcgcggcctgcaaaatggaacagcgtgcgaacagcagttcagttccttccggggagcgttctgtacgcaggttgcgcacatagtcttctgcaccgagggcgataccgatcaaacgctcggaagcgtgagcgatttccactgcgcgggtaatccccagcggagattcaatcgccgccagcaggccggtgctgccgggttcacgaccacaggctttttcgatacgcaggatctctttttcaatatccagaacatcctgagcggtatcggttttcggcagacgcacaacgtccgcaccaccgcgaacgacggcttccaggtcgttaacaccccattcggaatccagcgcgttgacacgcacaatggtttcaatatcgcgatacagcggatgttgcagcgcgtggtaaaccatgcggcgggcggtgtctttttcacgcaatgctacggagtcttcgaggtcaaacatcagggcatcagccgggtagatgaaggagttgctgaccatcgcggcattggcaccaggcacaaacaacatgctgcggcgggtgcgagttttacgttgttgcaggctagcggaaatcattggcaatcctcccatggcagagccgggataccgctggcgcgtgccagcagggcttccagtcgtgcacgtaaaatgcagtccagtgcgcctttgtcatcgacattcagctgtacgccgcgcacgttgtagcgggcgagaacgtccagaatggtggtgcgaattgcatcgccaaactgtttctcaacgctgctattgatttgcaggtcgatatcctgcgtatcgagtggggcgatgcgtatcatcacatccccagactcaagggtgcctgcaacggcgggctggtttattttcatttttcacctgtttctcatgcgggggtcttttgacgagctgccgcgtcctggcgggagtgctcaagcaggttctgcaaataatgcagcgtgactgcagggaccagcggcgcgatagccgtgagatcgtttttcgccagcagttgacgtacccgggaagcggatatcggcatctcctggtaacgcagccgctcaatttcaaccagttcgatgggcggtgcggagatagtcggcgtttccagccagtagcgcatatcctggttgtactgggcggtaacgcgacaaaagggttcagtaccgacaaagcggtgagttacacccagcgcgggagcgaggtactgacggaaaatcttcagatcaatttcggtgtaacaatggttaatgacgctctgttctttaatgaagtagcaagggaacgtagcgcgggagatgatgtattcggagccacgatgcacagtcaggcgtggaatatcggcggtgccttttaacaccaaatccagccggtcttcataggggaagcgactagaatcttctttgactaaaaacagatgcaaccagtcgcactgtgccgcagcctgttgaatcagataacggtgaccattcgtaaagggattggcgttcatcacaatgcagccaatcttgttccctggatgacgaaattttttcaggctttcggcatagcgtttcagtcgcgtggcgctgttttccatcagcaccatcacgccgggtacgctggtcagcgtggaaaaaccgcactggcggaacagcgcctcgtattcggttttggtataaataaacagatgcgtgctgtgccgctcataggcgaggtttatcaattcagtggctaatgtcagcgccagtccttcaccgcggacggattcactgatagcaacgcatttaataatatttccggcaattccaccgcacgcgataagcttttcatcgcgggttacggtaataaatacttcgactgtggtgtcaacgctcaaatcattttcatgcaggaattgggcgatttccgccatttttttattttcactacgttttacgcgggtgaaaatatcattgccgaacataataaatagtatcctgaaggtgcatgttgttatcgatttgcaacgaatgttgttcaatgttgcaaactgataaccttttattttcacttgggagaaagggggtgatcgaggtatatctttttctcctttcgctatacatcctaaggagtatttcggcgtgaaattttgatttatttcacatagagttagtggttttttatttatttaatgattttaagttttttaattaatgtaattacgaaatgactcgcaggtttaagtgatttaattgatttaatgaataaaatttgccacgatcataattaatatctatgtattttgattcaacattttaattacatccgtcaaagaggctcgggacaacccgcaaggaaaacaatgttgcagcttaacgagaataaacagtttgcatttttccaaagactggcatttccgctgcgtatctttttgctgattctggtgttcagtatatttgtcattgcagccctggcgcaatattttacggccagttttgaggactatttaacgcttcatgtacgcgacatggcaatgaatcaggcgaaaattattgcctccaatgacagtgtcatctctgcggtgaaaacgcgtgactacaaacggctggcgaccatcgctaacaaattacaaagagataccgattttgattatgtggtgattggggaccggcacagcatccgcctttaccatcctaatccggagaaaattggttatcctatgcagttcaccaaacagggcgcgctggagaaaggggagagctacttcattaccgggaaagggagtatggggatggcgatgcgcgccaaaacgccaatctttgatgacgatggaaaagtcatcggcgtggtgagcattggctacctggtgagtaaaatcgatagctggcgggctgagtttttattaccgatggcaggtgtgtttgtcgtgctgttagggattctgatgttgctgagctggttcctggccgcgcatatccgtcggcagatgatgggcatggagccaaagcaaatcgcacgcgtggtccgtcagcaagaggcgctgtttagtagcgtttatgaagggctgattgcggtggatccgcatggttacattaccgccatcaatcgtaacgcaagaaagatgctggggctgagttcccccggacggcaatggttgggtaaacccattgttgaagtggtcaggcccgccgatttctttaccgaacagattgatgaaaaacgtcaggatgtggtggcgaactttaacggtctgagcgttattgccaaccgggaagctattcgtagtggtgatgatttgctgggggccattatcagctttcgtagtaaagacgaaatttccaccctcaatgcgcaactgacgcaaataaaacaatacgttgagagccttcgtacattgcgacacgagcatctcaattggatgagcacgctcaatggtctgttgcagatgaaagagtatgatcgcgtgctggcgatggtgcagggggagtctcaggcccagcaacagcttattgacagcctgcgcgaggcgtttgccgatcgccaggtggcggggctgctttttggtaaagtgcagcgcgcccgggaactggggctaaaaatgatcattgtccccggtagccagcttagccaactgccgccaggactggatagcaccgagtttgcagccattgtgggcaatttacttgataacgccttcgaagccagcctgcgtagcgatgaaggaaacaagatcgttgaattattcctcagcgatgaaggcgatgatgtggtgattgaagtcgccgatcagggctgcggcgttccagagtctctacgagacaaaatatttgagcagggggtcagtacgcgtgctgacgagcccggtgaacatggcattgggttgtacttgattgccagctacgtaacgcgctgcggtggtgttatcactctcgaagataatgatccctgcggtaccttatttagtatctatattccgaaagtgaaacctaatgacagctccattaaccctattgatcgttgaggacgaaacgccgctggcagagatgcatgcggaatatattcgtcacattcccggattcagtcagatattactggcgggaaatctggcgcaggcccgaatgatgatcgagcgttttaagccggggctaatcttgctcgataactatcttcctgacggtagagggattaatttactgcatgaactggtgcaggcgcattatcccggcgacgtggtgtttaccactgcagccagcgatatggaaacggtgtctgaagccgtacgttgtggtgtatttgattatctcattaagcccattgcctatgaacggctggggcaaacgctaacccgtttccgccagcgtaaacatatgctggaaagtattgatagcgccagccagaagcaaattgatgagatgtttaatgcttatgctcgcggtgaacctaaggacgagctaccgaccggcattgaccccttgacgctaaacgcggtgcgaaaactgtttaaagagcctggtgtgcaacatacggcagaaacggtggcgcaggcactgaccatcagccgcaccactgccaggcgttatcttgaatattgcgccagccgccatctgattattgctgaaattgttcacggcaaagttggcagaccacaacgcatataccacagtgggtgacatgataaagccggaggaaacttgcctccggcattactatttacttgcctgtgaccgctgctgccgttcctggcaccatcagctctgtagcaacgataacaatcaccaaaccaacaagcaccggtacgctggtgcgttttacgacttcaaacgggctgatcttcgccatcccggcaaccgcaacgactacgccagaaacggggctaagggtacggccaaggttactcgcctgcagcatcgggatagtcaaatacgccgggttaatgccggaagagtgcgccagtttcgggatcatctcaacaaacgcataaaacggcgcattgccactaccggtcgtgactgccgccagcattgtcagaatcaccaataccagcatcaggatgatactcgcgctaccaaagctggtagcgatagaaatcagactttgaataaagccgatggtgctaagcccctgagcgaataccccagcggcaaccagcagcatcaccacgttagcaaacgcatctgccatcccgcgataagccacttccagaccagagaaaactttctgggtattaaagctgcggaggaactccagaatggaggcaatcagcatacaaatcaccagaatagtgatgatgtgtaattgcggaccccatttaccgtcaaaaatcagtacaccgatgatcggcgtgaacggcaaaatggcataaaacgcaggagcagtggtggtgatttcactgacatctaacatttcatgagagatgtgctcttttttatccagataacgttgccagaagaagtgggcgatcgccatgccgataattgcagcaatactgataggcagcgtcgttttgaaggcgaagtcaatcaggctcatttcggaagcttgcgccgccagcaccacatccccactagtcggtgcgagaataatcgccgccggggaggcacaaatggcagcagctgcgccacgactgataccaacgtttaccatcaccggaaatagggttgccatcagcaaaacacccagaccggttgcggaagagacggccagagacatcagacaggcgacaaaataggcggcaatcatcagcaggtaaggggagttaatatactgcaatggtttactcgccagcttgaccaccatatcattcgcgccgatatgggtcatgtaagcggcaaatccacacagcatcataatcatcatgccgaggtcgccgccgcggctcattagtaatattttaacgtattcaacgatatccgtggcgctgtagcctgtactagcctggctggacggtaacactttgtgccccataatggcactgataatcagcaataacaggccaccgacaaataacacaccagtggcggaataccctttaatgatgtagcgagctacacccacaataaccacaaccccaataaggagctcaatgaatgtcagcataatttttcctgtctccaggccccaaagtaaataataaaaaattcctaaagcttaaggaaaaaatatgcccaataaattggcgatgaatgctgattaaaatcaagaaaaactgccattaagacattgaagttgctgtttttatacatagataacaaaacgcatatttagcggttggcaattatcacataataatgtgtgcaaattgatggtggattgatgcaaatttgttaattgcaatggtgttagctgcggctgtgcgctcaaaaaataatctaatatgagcataggttgacgatatatattatatacttcgttaagatgattgttgtatctcgttaaaaaataaaataatttttccttgattgcattttgtcatcaaaaaagacttggtttttcttttttgactattcccatcgcagaaaacgacgcatcatctttaatcgatgcgcggaaatatttaacttgaacaagcggaaataaatagagcagctattcagattattctttatgttgggtctattaaggttatgttaattgtagctttgctatgctagtagtagatttttgataaatgttttatggtcacaaatgaacgtgagtaaatatgtcgctatcttttcctttgtttttattcagttaatcagcgttggtaaagtttttgctaacgcagatgagtggatgacaacgtttagagaaaatattgcacaaacctggcaacagcctgaacattatgatttatatattcctgccatcacctggcatgcacgtttcgcttacgacaaagaaaaaaccgatcgctataacgagcgaccgtggggtggcggttttggcctgagccgttgggatgaaaaaggaaactggcatggcctgtatgccatggcatttaaggacagctggaacaaatgggaaccgattgccggatacggatgggaaagtacctggcgaccgctggcggatgaaaattttcatttaggtctgggattcaccgctggcgtaacggcacgcgataactggaattacatccctctcccggttctactgccattggcctccgtgggttatggcccagtgacttttcagatgacctacattccgggtacctacaacaatggcaatgtgtactttgcctggatgcgctttcagttttgagacaaatgaagttttagtaacttctttaaaatcaatagctaaaataagtaacatcaaaaataacgcgacttttatcactttttagtaaagttacactggacaaagcgtaccacaattggtgtactggtaaccgacacagcatttgtgtctatttttcatgtaaaggtaattttgatgtctaagattaaaggtaacgttaagtggtttaatgagtccaaaggattcggtttcattactccggaagacggcagcaaagacgtgttcgtacacttctctgcaatccagactaatggttttaaaactcttgctgaaggtcagcgcgtagagttcgaaatcactaacggtgccaaaggcccttctgctgcaaacgtaatcgctctgtaagatacgtcagcaagaattcaaaacccgcttaatcagcgggttttttttggtctttagtgtgcggtactggcgctaaacagccagaatgccagtgcggtcatggcaaaagaccccagaaggttgacgaaaacgttcagtaatgcccagccaaagcggccctcttgtaacaaaaacaccacttctgcgctaaatgtactgaaggttgttagaccgccacaaaatccggtggtgattaatactttccacactggatcaatgttcgtcatcctgctgaaccatgcgaatcctattcctatgatgaatgccccaatcaggtttgctgtcagcgtccccaacggaatcgcctgatgcagtgggttaaatcgcatacttaacagccatctcgccacgcttcccgtaccaccgccaataaaaactgctaaaagaagttgtaacactgcaaaatcctgctatttgatttgtatgagtgataagtgtaacgccgaataatcgtcgttggcgaattttacgactctgacaggaggtggcaatgctggttgccgcaggacagtttgctgttacatctgtgtgggaaaagaacgctgagatttgtgccagcttgatggcgcaggcggcggaaaacgacgcaagcctgtttgccctgccggaagcattgctggcgcgcgatgatcatgatgcagatctaagcgttaaaagtgcacagctgctggaaggcgaattcctcggactttacggcgagaaagtaaacgtaacatgatgacgacaattctgacgattcatgttcctagtacgccggggcgcgcatggaatatgctggtggcacttcaggcaggaaacatcgtcgcccgttatgccaaactgcatctctatgatgcatttgccattcaggaaagtcgccgtgttgatgctggtaatgaaatcgctccgttactggaggtggaagggatgaaggtcggtctgatgacctgttatgacttacgctttccagagctggcgctggcacaggcattacagggagctgaaatcctggtacttcctgccgcctgggttcgcgggccgctcaaagagcatcactggagtacgttgcttgccgctcgtgcgctggataccacctgttatatggtggcggcgggggagtgcgggaacaaaaatatcggtcaaagccggattatagatccctttggcgtcaccattgcggcagcgagtgaaatgcctgcactcattatggcggaagtgacgcccgaacgtgtgcgtcaggtgcgcgcgcaactgcccgtcttaaacaaccgtcgctttgcgccgccgcaattattatgatgtttttttactcggcgcttgattcaccttgttacagattgctattgtgtgcgcgcgtcgaatgaccgttaatattctctggtttttaaggcgcgttctgttgccggttatatgtcaagaaggtatctatgggtgagattagtattaccaaactgctggtagttgcggcgctggtcgttctgctgtttgggactaagaagttacgtacgctgggcggagaccttggagcggccattaaagggttcaagaaggcgatgaatgatgacgatgctgcggcgaaaaaaggcgcagacgttgatcttcaggctgaaaagctctctcataaagagtgacgtggcgagcaggacgctccctcaatatcttgttcgatacaaaaaacccgcttcaaaaagcgggttttttatcagacagatgtaagtaattattacaggattacttaacttccatccctttcgcctgcaaatcggcgtggtaagaagagcggacaaacggaccgcatgcagcatgggtaaagcccatcgccagcgcttcggctttcatttcgtcgaactcatccgggctaacgtaacgttgaaccggcaggtgatggcggcttggctgcaaatattgccccagcgttaacatcgtcacaccatgacggcgcaggtcgcgcattacctcaataatttcttcattggtttcacccagtcccaccatcagaccagacttggtcgggatttccggatgcgcttctttaaagcgttccagcagcttcaggctccagttgtaatctgcaccaggccgtacctgacggtaaatacgcggtacgttttccaggttatggttgaacacatctggtggcgttgcagtcagaatatccagagcacgatccatacgaccgcggaaatccggcaccagagtttcaattttgatttgcgggcttttttcccgaatggcagtaatgcaatccgcaaagtgctgggcaccgccatcgcgcaggtcatcacggtcaacggaggtgataaccacataacgcagcgccatatcggcaatggtctgcgccagtttcactggttcattggcatcaggagctaccgggcgaccgtgggcaacatcacagaacggacaacggcgggtacaaatagcgccgaggatcataaacgttgctgtgccgtggttgaagcattccgccaggttagggcaggaggcttcctcgcagacagaatgcaggccatttttgcgcattgcggctttgatgccctggatacgtgtagagtccgctggaagcttgattttcatccattccggcttgcgcagcagggcttcgcgctctgttgccacgtttttaaccgggataagggccatcttatcggcatcgcggtatttaacaccgcgttccatcacaatgggtttactcatagcgtgcgtgttccagttgcgaattacgaaggaaagcgtttcaattcaatagattgttgtaattatcaactatttttgaattaacgactggcagtatatcattgaaacggacctgaaagcagccaaagcggtcgcgaaaatgtaaaattgttgttggattgtgccattttatcgttctgcgctgtgatctggctgtaacaatactttttcaaaatgcattacggataacatctattactccgtgcaggatgggatcacgcaggctgaatttgttgtagtggatagagaaatctatttgctcctcatttaaggacggaaaaggcagtttttccagcggccagcagcggctaaacaggttataaaaacggctgggaataatcgctaacatgtcactgttggcaaccagtgcagcgattgtcaaaatgttgtagctggtgaaattgatttgccggtccggaaacatttcttgaactctctgccgcagaccgctgaaattttgctcttccggtaacagaagtacatgcgcagcgttgtcgatagtctctctgtcatcttctaaagagagtagtggatttccctcgcggcaaattaacaccatattgtcggtgaacagaacatgatgttgcaccgtacgattggtgcaaaacatgttatcgatgatgagatcggtttgaaactgactgagttggttttccgcgtcgctgatgggcgggttgcgcagtaaaagctgcggatagtgagttttaatcgcccgatagatgacaggaaggaccagtgctccgacgctgggagtggtcgcaatagttatcgttcgttgcttatcatagcttccttcgatatccagcgcgccaagaatggactcaaggccctgactgatatactcatgtagatgcatcgcaaatgcggtaggagtgacaccctggcctttgcgaataaacaatgggtcagggaatataacgcgcagtttctgaatagactgactgattgcgctgggggtcagattaagcactttcgctgcattaacgatccctttatgtacatatacagcttcaaaaatagtcagaaggttaagatcaatatttcgtaaggttgtaaatatttgtggtttaccttcactgctctttctgcttaaacagggttcaatttgattattactatccacgcacttactccaattttattcatggaaaaataatatttaaaaaattacaataatcttatgtctaattggaacggaacgcttttgctcaccataatcaactatttcaataggttaatcaatggggtgagttacggagcaaggcgtggcaccgcatttctgcaagtgataaagaaaatatacaaacgcgaaggagatgtaaagcattagcagatattatgagtaatgacccagtgtaaattgggccattgatgtatggaattaagcggtaatatattcgaagtccggattgtttagtagcgctaaaatattttccagtaaacgtggagcaatattattagtcgtcgcttcgggtttccattgacttattttagccatttccattccggcatacccacaaggattaatacgtaaaaatggactaagatccatattgacgtttaatgccagaccgtggaaactacaaccgcgtcgaatacgtaaacccagactgcaaattttcttttccccaacatagacacctggcgcgtcagcccgaggatgcgcttctatacccagttcagccagggtattcaccactgtttgctcaagcaaggtcaccagttcacgcacaccgagtttacggcgtttcaggttaagcaacacatacatcacctgttgccccggcccgtgataagtcacctgcccaccgcgatcgctctggatcaccggaatatcacccggcattaaaatgtgctccgcttttcctgcctgaccttgggtgaataccggatagtgctcgaccagccagatttcatcaagggtactatcatcgcgggtatcggtgaattcatgcatagcctgggagattggctcgtaaggctgaagaccgagctggcggacaagaattttatcctgatacaaaacggcatctccgtggagaatgagtaaaagtgggggaaaagtatatcacagcgaggagaggggagttacccgaccaggagccgggtaacggagaagcgagttacagaaccatgcggacaatatcgattttgcccagttcttcatacagtgtttcaacctgctcgatatgagtggcgttgatagtgatagatacgctgtggtagttgcctttgctgcttggttttaccgttggggtgtagtcacctggcgcatggcgctgtaccacttcaaccacctgatcaaccagctcaggtaacgcctgccccataactttgtaagtaaaaggagtagggaattcaagcagttcgttaagtttggttttcatgtcagctccggcgtaacgtaattaaatagcaactcccgccagaaggcgggagttttttactgatgcttagtatatggggacggaaattacactttcaagtgtttaatttttaaccaaaccagtgatggaacattaatttaatgtaatcaatgattttgccgaagaagttaccttccgggatttcttgcaacacaaccagcgggcgttgctcgatcgttttgccatcaagctggaagttgatagttccgacgacctgattcttttgcagcggcgcatgcaattcactgctgttcagcacatagctggctttcagatctttcatgcgaccacgcggaatggtcaggtacacgtctttatcaacccctaagctagcgcgatcagaatcaccaaaccaaaccggttcagaggcgaactctttacctactttcagtgggttaacggtttcaaagaaacggaagccccaggttagcagttttttactttcggcttcacggcctttaaaagtacgtccgcccattaccgcagaaatcaagcgcatctggccttcagtcgcagaagcaacaaggttgtaacctgctttgtcagtgtgtccggttttgatgccgtcgacattcaggctgttatcccataacaggccgttacggttcagctggcgaataccgttaaacgtaaattctttttctttatagatgctgtattcattcggtacgtcacggatcaatgcctggccgatcagcgccatatctcgcgcggagctgtactgaccatcagcatccagaccatgtaccgtctggaagtgggtatttttcaggcccagtgcgttaacgtagctgttcatcaagccaacaaaagcgtcctggctaccagcggcaaaatcggccatggcgacacaagcatcgttaccgctttgcaggttaataccgcggatcagctgagaaaccggaacctgcatgcccggtttgaggaacatcaggctagaacctttaaacaccgggttaccggtggcccatgcgtcgttgccgatagtgactaaatcagtttctttaaatttaccggctttcattgcctggccgataacgtaactggtcatcattttggtcaggctggcaggatcgcggcggacatctgcgttctgttcggcgagcactttgccggagttatagtcaatcaggatgtaggactccgcatcgatctgcggtacacccgggatcatagttttgatattcaggtcatcggcatgtgcagcagagataaaggctgtgcaaagagccgtggtgagcgccaggcgcttcatgatacgagcggaaaaaatggtattcatggtctgaactacgacatccgtgatggaattaaaaaagtgccctactatagcaaatgcactaccggcaggcatctgactttccgcgtgactttgttaacgtcatttacagaaattgacacatcagatgcctgctttacgttactgcgcggtagtaataaaactctgtaattgggcttcggtttgcaaacgttgctgcaaggtactggcttcggctttgctggcgaatgggccaagctggatccgccagaccgcgccattttgagttacgcgaccggggacgccgaacttctgtcccagttgctgttggtactgttgcgcacgagcctgatcgcttacggccccgacttgcaccataaagttgccgctggcgctttggctgacggcttgcggtgtcaccattgcagggctggttgcaggcgttgtgctcggagctgtaacaacgggctgtggcgcaggcgtcggttcgctgccttccagtacaccaggcgctaaggtcgttggtgcgccgaggaaaccgctactggttaccggcgcgccggtcggatcttcgctttttagcgtgctattactgaccggaagaatgtcaccctgcgggccagacacactacttgttcccgcgccaccgcttaaatcgggaggtgcaggcagggcgtaagtctgtttggcgactgtggtacaagccataccaggaccagaaaggctaccatcctgggcaacaataatcggatcgatacgaactttggtgttgttactcgtgttaagacggtcagctgccgcgcgagaaagactaataacgcggtcgttgccgtaagggccgcgatcattaatgcgcaccacgatcattcgcccgttagccaggttagtgattctggcgtagctggggatcggaagcgttggatgggctgccgtcagctgtgtcggatcgaatgcttcgccagaggccgtcaggttactgccgggttcggcatcatagattgccgccagtcccgcctggctaaatcgagacggatcctgcacgattttgtagcttttaccgtcgcgctggtaatcctgatttgccgtcgcgttcagtggttcgaaacgcgggtccgccccgctaatttcaactatagggccgttacataccgcaggctgcggtacacttaccgtctgttgctgaccatcatcgcttgtacatgccgcgagcattcctgccgcgatgcagatcccgagccactgcttacgcattgcgcacctcttacacgcttttgctcaacattttcctgtgggtgtggatactcattacaatcccgaacccagccatcagcacaattagcgcgcttcctccataactgaccagtgggagcggaacccctacaaccggcagaataccgcttaccataccaatatttacgaagacataaacgaataatatcagcattaagccgccagccatgacgcgaccaaaggtggtttgcgctctggcggctatccacagcccgcgcatgatcagcagaatgtagagagcgagcagaatcagaatgcccactaatcccagctcttccgccagtaccgcgaagataaagtcagtatggcgttcggggagaaattcaagctgactctgagtgccgtgcagccagcctttgccgcgtaatccgccggagccaatagcaattttagactgaataatgtgatagcccgcgccgagtgggtcactttccgggtccaggagcatcattacgcgctggcgctggtaatcatgcatcaggaagaaccacagaatcggaatgaacgccgctaccagcactactgcgacgccaatcagacgccagctaaggccagagaggaacagtacaaacagaccggaaagcgcaacgaggatacttgttcccaggtcaggctgtgcagccaccagcagcgtgggcataaatatcagcaccagcgcgatgccagtgttcttcaagcttggcgggcaaacgtcgcggttgataaagcgcgcaaccatcagtggtacggctattttggcaatttcgctcggctgaaaacgaacaataccgaggtccagccagcgttgagcacctttagagatggcaccgaaagcatctaccgccaccagcaaaataatacagatgatatagagatagggggcccagccttcataaacgcgtggaggaatttgcgccatcaccaccatgatgaccagacccatcgcgatttggccgattttacgctccatcatgccaatatcctgaccgctggcgctccagataaccagggcgctgtaaaccagcaatgccagtaagatcagcagcattgtgggatcgagatggactttatcccagaatgtttttttattcggattatccgtcatgattaatggtcctccgctgcggcaaccgctggattttccgcaggcagatcggtgttgttatcacccagcataatgtggtcgaggatctggcgcatcagtgtaccaaccgccggacccgcaccaccgttctccagaatcatggcgacagccacttgcggattgttgtatggcgcaaaggcggtcatcagtttgtggtcacgtaaacgctcggcaattttgtgcgcattataggtttcgttcgctttcagaccgaagacctgagcggtaccggatttcgccgcaattttgtacggtgcgctagcaaagtatttatgcgccgtaccgttagggcggttagcaacaccgtacataccgtctttcgccagctcccagtaaccggaatgaatatcgccgacgggcggttcatgcggctgtacccatggcacctgtttgccgtcttcggcggtgctcatcagcaaatgaggaaccttcacgataccgtcattaatcaggatcatcagtgccttactcatctggattggggtcgctgtccagtaaccctgaccgataccaaccggaatggtgtcaccctgataccacggttttttaaagcgtttctgtttccattcgcgggtaggcatgttgccggaacgttcttccgccaggtcgataccggtgtaatgaccataaccgaatttacccatccattcggagaggcgatcgatccccatatcgtaggccacctgatagaagaaggtatccgcagattcttccaggcttcttgtgacattcagacgcccgtggccccattttttccagtcacgataacgtttttcgctacctggcagttgccaccagcctgggtcaaacagcgtcgtattgcgcgtgatcaccccggcgctcaatgcgctaaccgccacatagggtttaactgtagacgcgggaggataaaccccctgtgtggcgcggttcaccagcggtgtattcggatcgttcaacaaggcggaataatctttgctggagataccgtcaacaaacaagtttgggtcataactaggcgtggaaaccagcgccagcaccccacctgtacgcggatcggtgactaccacagctgcgcggctacccgccagcagcgtttcaatatattgctggagtttgagatccagcgtcaggtaaatatcgtgtccggcttgcggtggtacttcttttaactggcgaataacacgcccacggttgttaacttcaacctcttcataaccggtctgaccgtgcagcacatcttcatagtaacgctcaatgcccagcttaccgatatcatgcgttgccgcatagttggccagtttgccgtcattattcaggcgttcgacgtctttatcgttgattttgctcacatagccgatgacgtgggtcaacgcgctaccgtaaggatagtaacgacgtttatagcctttaacttcgacacccggaaaacggtactgattgacggcaaagcgagctacttgtacttcggtcaggttagttttcaccggaatagaggtgaaacggtgactacgtgcgcgctcttttcggaatgcagcaatatcgtcatcggtcagatctaccacgctgcgcaaagcgtccagcgtttgctgcacgttatcgactttctccggcatcatttctatctggtagatagtgcggttgagggccagagggataccgttacgatcgtagataatgccgcggctgggcgcgataggcaccagcttaatgcggttttcattagagcgggtctggtagtcggtaaagcgaacaatttgcagattatacaggttggcgataagcacgccggtcagcagcaaaatccccaaaaaggcgaccagcgcccggcgcacaaacagcgcggactctgccgtatagtcgcgaaaagagttctgtagtttcatccgctgcgttttctactcaaagctcccttatcactcacggtgataaggatggttggtggtgatgctccacgcccggtacagactctctgcgaccagcacgcgaaccagcggatgggggagggtaagcgcgctcaggctccagctctgctcagccgccgctttacaggcagggctcaacccttcaggcccgccaatcagtagactgacgtcgcgaccatccagcttccagcgttccagctcagcggctaactgcggcgtatcccagggcttgcctggaatatcgagggtgacaatgcggtttttgcctgcggccgccaacatctgctcaccctctttgtcgagtatgcgcttgatgtccgcattcttgccgcgttttccggccggaatttcaatcagctcgaagggcatatctttcggaaaacgacgcaggtactcggtaaaaccggtttgtacccagtccggcattttcgttcccacggcgacaagttgcagcttcacgcattaactccagagtttttccagttcatacaggcgacggctctcttcctgcatgacatggacaatcacatcgcccaaatccacgacaatccagtcggcgctgttttcaccttctacgccgagcggtaacaggcccgctgcgcgagactcctgcacaacgtggtcagcaatggacataacatgacggctggacgtacccgtacagatgatcatgcagtcggtgatgctggatttgccctgaacgtctaaggcgatgatgtcctgacctttgaggtcatcaattttgtcgataacaaaatcctggagtgctttaccctgcaagttttccccctgggtgaatcaaatagataaaaatggtctgtcagtatacctgaaccagaggcgatttcgggacaattgtcgccgaatcggctttcgaaagtgggctatcatcccaccccgcgccgcagattgcatcgccatttttgtaaaacaatttctacaaagtcgtgtctggcggaaaaagtctggctgcggagaatatcagcctgcccgggtctgtcaatggtcgttgcggcttacccgtaaaaaaacagaaaagtcatgcattctcgaccccgatggcacggctattgaggacgcgtagcgtcgcgaatttttggttgatatcaatggcgctccaacacccctggtcaacgcgaaaatgccacatagcttcggcaggcatgccaattaaacgggcgattaacagactcagtacaccctgatggctgacgactaaaatattctgatagtgctgaaattcactaagccttgcgataaagcgttccacacgttggctaaatgcctgaaatccttcaccgttcgtggggattgcatgctgccagtcattgcaccacgcgctatagttttcggcatcttcttgcatgaggtcgcgatgatgtcgcatctcccagtcgccaaaaaacatttcgttgagttcaggtatgatttgcacggggagctggcggtcactgagaaccagtcgcgcggtatgctgtgcccgttccagttcactgcataaaaccagatcaaaggaaacaccatgtagcagcgtatgcagattttgcgcttgctcaataccgcgcgcggtcaggggggtgggcgcatgaccgctgtaaagaccatcgatattcgcttgcgtttcaccatgacgaattaaccacagtcgcatcatgccctccgtaacgacaggtatcagcgatacaagccttgttggttaatgtaagtcagtaccggttccggcaataaatcctcacaactttcaccgttttgcaaacgttcgcggatgatggtcgcgctgatgttaaaccacggcgtttcagccagataaattttaccggcaggctgaaggtgaagatcttccgggttatgtgtcaaatgatcttccagccattgctggtattgcggttgcgccatttcaagtgggtaacctggacgccgacagacgatcaaatgtgcattgtcgagtatcgtttcgtattcgtaccaggtcggaaaggtcagcagactatcctgaccaataataaacgccagcggcacgtccggtccttgttcctgccgccactctttcagtgtttgcgcagtgtaagagggggcattgcgctttagctcgcgttcatcaagagtaaataatggcttgtcggcaatcgccagttcaagcatgtgtttacgctgcacgctgttcgcttccggctggggacgatgcggaggaacattattagggatgattgtgacccgcgtcagaccaatcaaattcgccagcgtttccacgggttttagatgaccatagtgcaccggatcaaaggtgccgccaaacagagcctgtaaagatttcatatcaaccgtcgataaatacgtccgccaggggtttatggcacaacagaagagataacccttccagctctgcccacacactctgaccgtaatcttgtttgagggtgagttccgttcgtgtcaggagttgcacggcctgacgtaactgcgtctgacttaagcgatttaacgcctcgcccatcatgccccggcggttctgccatacccgatgcttatcaaacaacgcacgcagtggcgtatgggcagactggcgtttcaggttaaccagtaacaacagttcacgttgtaatgtgcgcaacaaaataaccggttcgctgccttccagacgcagttgctgaagaatatgcaatgcgcgcttactttttcccatcaacaaagcatcaacccaatgaaaaggggtgaaatgcgcggcatcattcaccgcctgttcaacgcgcggtaatgtcaatttgccgtctggccagagcaggcttaaacgctccagtgcctgagccagcgccagcaggttaccttcataacagtagcagagcacctgatttgccgcgtcatccagttctaagttgagctgttttgcgcgcgcagcaacccagcggggaagctgagcctgctccggtgtctgacaggtcacctgcacgctgcgattcgcaagcgcagtaaaccaggcggcattttcttgcgctttgcttaatttattaccgcggacgatcaacagcaggtcgtcatgcagaagtccggtgagtgtgagaagttgctcattgatcgccgcattcggtccgttttctggtaacaacagcaatagcgtttgtcgactggcaaacagactcatagcctggcataagctaaagatcgcattccagtcagtgttgggatcaatggaaaaagtgtggtgttcttcgaatccttgtgccgcagctacctgacgaacagcgtcctggctttcctgcaataacagaggatcgttaccaagtaaaagatacgccgcgcgcagcccttcattgagctgcgcgcggagttgttccgggtacaaccgaatcatcagttacccagcgtggtggagacgcgtgcaggcgttgccggagtatccgttgtggtgctcgtctgttcttcgtcggaacgaatatccgcagcacggatgcttggcagcttacgaatcagctgttcggcagcacggtcgtacatctcttttacgatcatgtcttgttcgttatctttcgctaacgccatttgcgggttatcgaagaagctacggaagactttggcgctaatcgggtagatatcacggccggggatcaacacggtcgcattaaccgtcatgatcatctgatactctgctgtttgaccgttacggaatacgcttgcggtatctttcgcgatgctcactttacccaaacgcaaggatggaacgtccttacgcgtggtttctttatcaagcaactcgacaccattcagacgtaactggttacgcaccgcacggcttaatggcccgttcggatcgccactgtccaggatcatgaccttcatagtggaaggaacctgcgtggtatcacgcagatgccagccacacccggcggtgattaacaccgccagagataacaacaatgttgccagatatcgcacgcttcctcccgcgcttagccaacgaccagattgaggagtttacctggtacgtaaatcactttacgtacagtaacgccatcaagatattttgctaccagatgttcctggccagcacgttcgcgaacctgttcttccgttgcgtccaccggaacggtgattttggcacggactttaccgttaacctgcaccacgaccagcgtggagtcttccaccatcgctttttcgtcagcaaccggccacggcgcgttgtcgatatcgccttcgcctttcagttcctgccacagcgtgaagcagatgtgcggggtgaacgggttaagcatacggacaacggccagcagtgcttcctgcatcagagcgcgatcctgctcgccatcggttggtgctttcgccagtttgttcatcagctccataatcgccgcaattgcggtgttgaaggtctgacgacggccgatatcatcggtcactttagcgatcgttttatgcacatcgcgacgcagcgctttctgattttcagtcagcgcatcaacgttcagtgccgcaacatcaccttttgctgtgtgctcgtaaaccagtttccagacacgtttcaggaagcggttagccccttccacaccggattcctgccattcgagagtcatatcagccggagaagcaaacatcataaacagacgaacggtgtccgcgccgtaacgttcaaccatcacctgcgggtcgataccgttgttcttgctcttggacattttgctcatgccggtataaaccagttcatggcctgccgcatctttcgctttcacgatacggcctttctcgtcacgttcaacgatagcatcaaccggggaaacccagttacgttcgccgttttcgccaacatagtagaaggcatctgccagcaccataccctgacacagcaactgtttcgctggttcgtcagagttcaccatgcctgcatcacgcatcagtttgtggaagaagcggaagtagagcaggtgcataatggcgtgttcaataccaccaatgtagatatccaccggcagccagtagttagccgcttcggaatccagcataccttctttgtactgcgggcaagtgtagcgcgcatagtaccaggaggactccataaaggtgtcgaaagtgtcggtttcacgcagtgctggcataccgttaacggtagttttcgcccactccggatctgctttaatcgggctggtaatgccgtccattaccacatcttccggcaggatcaccggcagctggtcgtccggggtcggcattacggtaccgtcttccagcgtcaccatcggaatcggcgcgccccagtaacgctgacgggaaacaccccagtcgcgcaggcggtagttcactttacgctcgccaacgcccatcgcagtcagtttatcggcgatggcgttgaaggccgcttcatggtcaagaccgttgaactcgccagagttgaacagcacgcctttttcagtcagggcttgctgagaaagatctggctcagagccgtcagctgccaggataaccggtttgatgttcaggccgtatttagaggcaaactcgtagtcgcgctggtcgtgccccggtaccgccataactgcgcccgtgccgtactccatcaatacgaagtttgctgcccaaacgggaatttcttcgcccgttaatgggtgaaccgctttaaagccagtatcgacgccttttttctccatcgtcgccatttcagcttcggcaactttggtgttacggcattcgtcaataaaggccgccagttcaggattattttccgccgctttctgcgccagcggatgacccgcagctaccgccaggtaggtacaacccataaaggtgtccgggcgggtagtgtaaacggtcagcgtgttgtcatagtcgttaacgttgaaggtgatctccacgccttcggaacgaccgatccagttacgctgcatggttttaacggtgtctggccagtgatccagtttatccagatcgttgagcagctcgtcagcgtaagcagtgattttgataaaccactgcgggatctctttacgttcaactttggtatcgcagcgccagcagcagccgtcgataacttgttcgttcgccagtacggtctggtcgttcgggcaccagttgaccgcagaagtcttcttatataccaggccttttttatacagctcggtgaagaatttctgttcccaacggtagtattccggcgtacaggttgccagctcgcggctccagtcataaccaaagcccagcattttgagctggtttttcatatacgcgatgttgtcgtacgtccacggtgccggagcggtgttgtttttcaccgccgcgccttccgcaggcagaccaaacgcgtcccagccgatcggctgcaggacgtttttgcccagcatacgctggtagcgggcgatcacgtcaccgatggtgtagttacgtacgtggcccatgtgtagtcgaccagaaggatagggaagcatagacaggcagtaatacttctctttgctctcgtcttcggttacttcaaatgtgcgcttctcatcccaatgaagctgtactttggattctatctcttccgggcggtattgctcttgcatggcagccagtggtcctgttttcaatacggctacaaatgtagcgttgaggtggtttttcagatccgcatagcatagcccaaacgtccgcgtcaaaacagcctttcgcgcactcgacgttgaaatgatgcccggattattcatacattaatttacagagtttgtgggcgtattagcaaagcaaggaacaaagaacgtctattattatagtcagttaacgacccgggagatgaaacgatgaacaaggttgctcaatattaccgtgaactggttgcgagtctgagcgaacgcctgcgcaatggcgaacgtgatatcgacgcactggtggaacaggcgcgcgagcgcgtaataaaaacaggggagttaacgcgaaccgaggtcgatgagctgacgcgagctgtcagacgtgacctggaagagttcgccatgagctatgaagagagcctgaaagaagaatctgacagcgtctttatgcgggtgattaaagaaagcttgtggcaggagctggcagacatcaccgataaaacgcagcttgaatggcgcgaagttttccaggacctcaatcatcatggggtttatcacagcggagaagtggtcgggctgggaaatctggtctgcgagaaatgtcacttccatctcccgatctacacaccggaagtgctgacgctatgcccgaaatgtggtcatgaccagttccagagacgcccgtttgagccgtaatagtctgatttcgcacagcaataaagagaatatgggccgaatgaaattccccggcccttgtttttatctttacagtaaatcttcagtctcacgaatttcctgactgacatctctggttccggaactctgaactttacgatacaggtcgagagcctgtcggagatcgacaggtcttccttctccgtagtgatacataatggccaggttataccaggcagtggcgtcattgcattcagcggctttcgtaaaccattcaaaggcagcctgataatctttctcaacgccttgtccgtgtttatacatataaccgatgttgacgtaagcgccgacgctcccctgagcggcagccttcagataccagtacatcgcttgcttatagtcctggtccaccccttcgccagcgttataatcccatgcaatttgaaactgggcgtgccgattaccctgctgtgcgcttttcaaataccagaatgcggcgagtgtcttgttttgagcaacgccttttccgtcttcataaagatcggccagattgttttgcgcgtcactatggccttgtaatgcagcttgtttgtaccagaaaaatgccagcgcatagtcttttgcgactccgttgccatttctgtacatccacccaagattattttgcgcataagacattccgctctccgcggctatctgataccagacaaccgcttctttataattgggggcttctccacgatccagtgtccagccaagggcgttggaagcgaaagtatggccttgtagggcagcttttttcagccagaagatggcttgctcattatctttatgacggcttttatcctcggtatacttttgccctaaggaatactgtgcttcacaatgaccttgctcagcggccagcttcagccagtaaaaggctttttcgtcgtccggagaatcaattgcgctatcgcgattataataaaacccaacaatatattgagcctcgcaatcgcctttttcagcacgttcgataatctcatctatacttaaattatcgcagcaactactcgtgaaaatcattatcatttccttatggttgcagataaaacatattatatttttatgtgttccatttttgcgtaagccttattttatgcgtattatgtcgcgtcagaaaagtataaataaacgagcctcgcaatgcggctaatattcatttaatgaatatttaaggataaattatatggacatggagagccaaaaaatattgtttgcactttccactccgatggaaatacgcaatgaatgctgtttacctagccatagtagtcccaaaatgtatttaggtacatgcttttttgacctttcttccagttggggaattgatgaccgtgatgacctgctgcgcacaattcaccgaatgatcgataacggtcatgccgctcggttggcagggttttatcaccgctggtttcgttatagcccatgtgaatggcgtgactatcttgctgaactaaatgagcaaggtcaggcttatgcgcaatttgtcgccagcaccgccgaatgctgtggcgaagggggaatcaaagcctgggattatgtccggatgggttttttaagccgaatgggcgtacttaataactggttgagcgaagaagaaagtctatggatccagagccgcattcatctacgggctctacgttattatagtaactggcggcaatactttgccggttatacctttggtcggcaatattggcagtctcccgaagatgatcatctgcctttattacgcgaattcttagcgcgtaaagaatacgacgattccggcaatgatatgttttatcaattatttgccagtgatgatgcgtattaccctaccttgtcctggcaaccattggcttactattctgcatgcccggaaacgcttaaggatatgagcgacctatgaaaaattgctggaagatcctcgatatagaggaaacgactgacgtcgatattatccgccgcgcttatctggcgctgttaccgtcctttcatccagaaaccgatccgcagggttttaaacaacttcgtcaggcgtatgaggaggcgctacggattgcgcagagccctgctaaatctgtttggcaaccagaagaatatgaggtagcagaacatgaaattctgctcgcctttcgtgcgttacttgcctctgatagtgaacgttttctgccctccgcctggcagcgattcattcagcaattaaattattgcagcatggaggagattgatgaattacgctggagcctgtgcacaatcgccatgaacactgcccatttatccttcgagtgcgtggtgttattagcagaaagattgcggtggttacaggaggaaaataccggggaaatagacgaagaagaactggaatcctttttatatgccattgcgaaggggaatgtttttaacttccagaccattctgcatctgcccgttgccgtgcaaaatgacaccatcgatttttaccaaatgttcgctcggatttggagtagccatccacaatggctgacattgtatttagcgcaacatcgcgcagtgattatccccgatgatgcaaaactgcacagaaatttactccgctggtatagcgcaggtcgcctggatatccccgaacttctggattacgcccagagttggcgggaaactgaacctgataatgaagatgcgccttattatgaatacgcgcaacgcgtctattgtggagaaggcgaaagcctgttggcagaactttgtgactactggcgcgagtatccctccacccaggcggatgctttaatgttgcaatggtgccgtcagcatcgggtcgattattacccattactggtgatgatgattgaagcgcgtgatctggttaacgatcagggaaaaccgctactttatgtccccggcgacagcgcccgtacgcgttttcatttatacgaaatactcagcgatgaaaaactctctgcgctggggcgtagtctggtcgagatggttttgcacaaaggacgtaagccgcggatcagtctcacgcgtgatacagaacataccttatggccattatatctagttgccaaacaattagtgcaggcctgccaacctacagaagaaagtttaatgccgattgtgagccgccttgatgcagaaaatcgttgtccactggaagcattaattattcgtcgattattaattcaggcggcgaattttaccgagaagcaaactgttgaaccggagccgcaaccgcagccaatgcccgttgacgatggtgggccaggctgtctgggcatcattaaaattattttctatatttttatctttgctggtttgatagggaaaatactccatctgttcgggtgacagtcgacgttaatgtgcgggaagcccggcaagtaatctttccgcatttttgtaatgttgtttggcggtcagttttaaccatttttgagattcataatggttaacattaataccactgccatttctgtagatcaaacctaaagtatattgagcatgagcatacccttgttcagctgcttccttataccagagaattgctttacgggtgtcgggtttgacccccagacctttgaggtagatccaccccagtttactttgcgcgcgtggattttcctgttccgcactttgctcataccagtatctcgcctgtgtataatccagtggtttaccgtcgctaccatgaagataaaattctccaaggcgatattggctcgtactgtgaccatgaatcgcggaaagctccgtggctgccgtggtgaatggaagactgcccggactgcttaaataatcaaaggcataattcaccatggctttatcacgcaacgtcgttttcttgggttggctaatacaggtaattgctgcaactataaaaattgcgaatatatacattaattttttattcatgtgtgaatgcttcgattttctttttattttgaaagcgtcaagtttatactcatcaataataaaaaagtagtcagttaatgcacttaagggattattaacaaatgaataaggaagaacaatatcttctttttgcgctttctgcgcccatggaaatacttaatcagggttgcaaacccgcgcatgacagcccaaaaatgtatactgggataaaagaattcgagctcagtagttcctggggaataaataatcgtgatgatttaattcagactatttatcagatgactgatgatggtcatgccaatgatttagctggcttatatctgacatggcatcgctcttcccctgaagagtggaaagcattaattgctggtggcagcgagagagggttgatttatacccaattcgttgcccaaaccgctatgtgctgtggggaagggggaatcaaagcctgggattatgttcgaatggggtttctgagtcgggtcggtgtgctcaacaagtggctgacggaagaagagagtttatggctgcaaagccgcgtctatgtacgagctcaccattactatcacagctggatgcactatttttccgcctatagcttaggacgtctctactggcaatcttctcagtgcgaagacaacactagcctacgcgaggcgctaaccctgtacaaatacgatagcgccgggagtcgtatgttcgaagagctggcagcgggaagcgatcgtttctatgccacgcttccctggcagccattaactgtccagtctgaatgcccggtaacgcttaaggatgtgagcgacctatgaaaacatgttggcaaatcctcgaaattgaaagcacgacgcaaatagacattatccgccaggcttatcttgctcgcttaccgttgtgtcatcccgaaaccgatccgcaagggtttaaagcattacgccaggcctatgaagaggccctgcgactggcggtaaatcctgtcgaggaagcagatgatgaagaaaaagatgctgccgctgaacatgaaatactacgtgcattcaggacattactggatagtgaaagtgatcgttttcagccttccgcctggcagaaatttattcagcaattaaatacctggaacatggaggatgtcgatcaattacgctggccgctgtgtgcaatcgccatagaagcgcgatatcttagtttaaattgtgcttctttgctggcagagcgtttgaactggcatagttttaatgacagcgaaggaatggatgaggaagaaagggaggcttttcttgaggccattcaggctggtgattgtttcgatttccttagccttctggaatatcccattgcgttgcagaaccagactgttgagtattacttcgcgctggaacgttgctgccgttaccatcctgactatgtcactgcgtttttggcgatggaaggtccgtggttaattcctgatgatgcaaagttacatcgcaaactgttgcgctggtacagcagcgtgcaaacaggtatggcggaactcattcctgtcgctcaacagtggcaaacggaagaaccagaaagcgaagatgcccggtattacttgtgtgcacaacgtttgtactgcggcgagggggaaagcctgcttgccgatctctgcgcgtactgggaaagttacccatctacacaagctgataatttgttgttgcagtggagcaagcgtcattgcccggattatttcgcgttattagtgatggttatcgaagcgcggagcatggtagatgcgcaaggtcaaccgctgaaatatgttcctggtgagagcgcccggacgcggctgttatgggcggagattttacatagcggaaaattaagcccgttaggtcaaagctttattgagagcttattcttcaagcgcaaagcatgggcgtggtggaaaagcagagtcggtagcgagacagagcaagatagtccgttcctggatttgtatcgggtagcggaacaggtagtacttgaagcgtttccgaaacaagagatgctggcccgtcttaatacaaggctggaaggcggagatgctcatccattagaggccattgtcacccggatgcttttgacgaaagtgaaactcgagccggaggatgaagatgtcgatgagccaacacctgaaaatcatgaagaaaaaaatgatgagggtgaaaaaccacagagcattaccagcattatcaaaatcagtttaacggtgctggtgataggttatgctctcggcaaaatcgcgatgttgtttagctgacgatgtgttttttgcgccgatgccggatgcagcgtttacgccgcatccggcagccgtgtttatgggatctcaatggctaaataatcgctcgcccgccgccgaacttcatccacgcgggccatatcgttactctgcaacgccgcatcaaaatcggtgatcacccggccgatctcttctcgctcgtcacccagcgcccgcgcccacaactcttccagtttggctttaaaggtgcgattgatgagcatatcgcgcggataaattttcaatgcggataaccgcgtccgactctcttcaatctgctgcgcgctcaatgttaccgggctgtggttaatcactctggacttaacgctgccgtcttccagaagcacgtcaacttcaagcaacccgttgatatcataactaaagcgaatatcaatgctctgataagccccggttttcttcaacggcacatcgaaggattccaccagaatgttgtttttaactttgtggttttctccctgatagacgttaaccgtaatactatcctgttccgggtgcatggtactataagtttctacacggctcacgggcacagtggtgtttcgttcaataatcgggctgaaaatgccggaaacgccctggcggttaacttcaacgcccaagctgtaagggcaaatatcagtgaggattacctcttcaatatcttcactgcgtaagcggcaggcggcctggattgctgcgcccagcgcgacaatggtgctcggatcgtaactttgatacggtaatttgccaaacagacgcacggcgattcgctgcaccagcggcatttgactcgcgccgccaaccagcaccagactgtcgatttgactcggcttcagacgcgcatcgcgcaacgcctgttcaatcggcactcgcaagcgattgagcagcggcaaccacaaatcttccagttcgttctcgtaaaattcgcattcccgcgtttcttcctgatactgccagcgaatgtgcaatgggctttgattgctacattttgccgcttccacacaggcgtacaaggctgccagttcactctcgttaagcgtggtcctggcgacatccgcgcgttttaaaacctcatcgaccagcatatgggtaaaatcttcgccaccaagaaagttgtcgccagcggaggcgtgaacttcaatcaccggcgtggcgtactcaagcaccgtaacgtcaaacgtgccgccaccgagatcaaacaccaggctacgggtattttgttgggtatgcaggccatacgccatcgcagctgctgtgggttcattaattaagcgtaccgcatttaacccggctaactccgctgctaaacgggtatgcttgcgttgttcatcgctgaaataagccggaacggagatcaccacatctttaatcggacgttgcagaaattcttcggcatcttcttttaaactgcgtaataccaaagaggacagttctggcgcgttaaatgtgtcgctgcctaaccgccagttggtattactgcccattgcacgtttaaataacgctgccgttttatccggatggctagtacgccgacttacagccggttttccgactaaaatatgattattttcatccatgctaattatggatggtgttaaatattcaccgaacttatttggaattaattgcgcggcaccgtctttccagacggcaattaaactattggtagtaccgagatcgataccaatggcgagttctgcattatccattgcatttatatcttgaaagaaaaagagataaacagattaagaccacccaggtaacgcgtggtgatcttaatcaatgacgtgtgttaagcgtaaaatttcagacgatcagccagtaaatcaacaaagccctgacgatcaacatcgaccattacggtggcattcggtttattgcctgtcagataataataatcaacaaccgtcataccctgggtatatttcccctgtgtttccacgccaacccagcgctcaacagaggtaaataactccggtttcaacagccaggcgatggtgcatgggtcatgcagtggtgcgccgacaaagccccatttttcgtctttatgatattcgaggaagaaatccagcagttcggcaacaatggtactaacagggttaccaatcgcgcggaaacgctcggtgtcttcaacgtggatttgtgctttatgagtaacatccagaccggccatcaccaccgggatcccactctggaagacaatttctgccgcttccgggtcaacgtaaatattaaattcagccgcaggcgtccagttacccagccccatagcgccacccataatcacgatacgggcaattttgctatgcagttccggatggctattgagcagcaaggcaacgttagtttgcggtccggtagacacaatggtgacaggttccgcactttcacgcagcgttttcgccatcagctctaccgccgtacagttttgcggtgcgaatgtcggttccggtaatgccgggccgtcgagaccgctttcgccgtgcacattgtccgcgataatcaactcacgcattaacggttttaccgcgccgcctgctaccggaatatcggtgcgattaagcaaggtcagcatacgcagaacattgcgtaaggttttttctggtgtctggtttccggcggaagacgtaattgctttgacatcaagctctggactggcgagggcgagaactattgcgatagcgtcgtcatgacctgggtcgcaatctaacagaattggcagtgccattgttgctccttgttgtgtgcttctttgcgacaagggtaacgccaggatgtaacagatacgaggggcgaaacgataaagcgtgagatggcgcgcaattgggtatgcgcgccagagtgattaatgcaggattttcgcgaggaagtcttttgcgcggtcgcttttcggatcatcgaagaaagcgtctttcgggctgtcttcgacaattttaccctcgtccataaagatcacccgattcgccactttacgggcaaagcccatttcgtgggtcaccaccatcatggtcattccttcgttcgccagttccaccatcacgtccagtacttcgttgatcatctccggatccagcgcgcttgtcggttcgtcaaacagcatcgcaataggatccatacacaacgcgcgagcgattgccacacgctgctgctgaccgccggaaagctgcgccggaaacttattggcgtgagcagaaagcccgacacgctccagcagtttcagggctttttcacgagccggcgctttatcgcgtttaagcactttcacctgcgccagggtcaggttttcgataatgctcagatgagggaacagctcgaaatgctggaataccatcccgacgcgggaacgcagctttgccagatcggttttcttgtcgttaaccacgataccatcgacggtgatttcaccttgctgcaccggttcgaggccgttgacggttttaatcagcgtacttttgccggaaccagacgggccgcaaaccaccaccacttcgccttttttcacttcggtactgcagtcggtcagcacctgaaagtgaccataccatttactaacatttttcagggtaatcattatgctgtccttcttttcaagtagctgaccaacaagctcgcgctaagactaataacgaaataaacaaatccggcaaacaggatcatctcaacctgcgtaccatcacgctcaccaatggtactggcggtacggaagaaatcggccagggataacacatacaccagactggtatcctggaacagtacgatgccctgagtgagcagcagcggcaccatcgcgcggaacgcctgcggcagaataatcagtttcatgctctgccagtgagtcattcccaacgccagcgcggcgctgctttgaccacgagaaatactttgaataccagcacggataatctcactatagtaggccgcttcaaacatgctaaacgccaccatcgcgctaattaaacggatatcattttttgggcttaatcccagcacgttttgcagaaaacccggcacgatcaggtaaaaccacagcaaaaccataactaaaggaatgctgcggaatacgttaacgtaggctttggcaaaccacgccacgggcgcaaagctggataaacgcatcaccgccagcatcgtgccccacaaaataccaatcactaccgccgtgacggtgattttcagggtgatcaccagcccgtcgagcagatatggcagggaagggacaatggaactccagtcaaactcgtacattatttgccccccatgttgccaggcaggcgaactttacgttcaaccagcgtcatcaccagcatgataaaagcgttaatcaacacatacgccagcgtaatggcggtaaagctctcccaggcatgggcactgtaatcgagcaatttacccgcctgcgccgccatatccaccagaccgatagtgctggcgatggcggagtttttcaccaggttcatcatctcactggtcatcggcgggacgataacgcgataagcattaggcagcagtacgtatcgataagcctgcggtagcgtcaggcccatcgccagcgcggcatttttttgccctcgcggcaggctctgaatcgcggcgcgtacctgttcgcaaacacgggcggcggtaaacagccccaggcagagcatggaactaaggaaaaactgaatattgggatccagctcggccttaaaccacatgccgattttctccggcagcagctccgggatcaccagataccaggtaaagaattgcacaatcaacggcacgttgcggaacagttcgacatacaacgtacccagaccagagagaaaacggtttggaacggtacgtaaaatgccgaaaaaactaccgacgaggaaagcgataatccaggcgcagatgctcaaagcgatcgtcacctgaaaaccactccagatccaaccaagataggtggtgttgccgaacggggcttgttgtaaaaaaataccccagttccagtctatagacataaatctactccagaaaaaagagggtagcagcgttaactgctaccctcgaagattgttacccagcgtattgcggttttcaggcccgatggggaacgaccatcaggcgtatagtctgtccgtgctacgtaacaatcgagagggctggaatttccgcccctggttcttgtaattagttcagtgccttgtcattcggttctttgaacagtgctttcatttcgtcactcagttcgaaattcatgttcaggtttttcggcggaattggatttttgaaccacttatcaaaccatttttccgcttcaccggaggtctgcacctgagcgatggtgtcatccatcagctttttgaactgcggatcatctttacgcaacatacaaccgtaggcctcctgagactgcggcttgccgacgatttcccagttgtctggtttcttcgctttcgcacgttcaccggccagcagagcgtcatccatcataaaggcaacggcacgaccgctttccagggtgcggaaagagtcaccgtgatctttggcgctgatgatgcgcatattcattttttgctcttcattcagtttgttgagcaaaacttcagaggtagtgccggaagtgacgactacggctttgtctttcaggttggcaaaatctttgatatcgccaccctttttggtcaacaggcgcgtaccgaccacgaaaatagtgtcagagaaagccgcctgtttttggcgttcgacgttgttggtggtagaaccacattcaaaatcgaaagtgccgttttgcagcagtggaatacggttttgactggtaatcggaatcagttttacctgcaagtccggtttgttgagtttctttttcactgcttcaacaatggcgttggagtaatcctggctgtaacccaccactttttgctgattgtcgtaataagagaaaggcacactagattcacggtgaccgacgacaatcacaccgtttttggcgattttgtccagagtactgcccgctgccggggcggcgtcatctgcctgtgccagtcctgcggaaagcgccagggcgaggattgctgtggcaggtttacgtaattgcatatccaactcctttatcttctgcgttaagaacgcatggatacccgttgtgagtgtttgtgttgttatcgtctgcaactttattgtgcagtgttgtgcctgttagggaaggtgccttaggtaacatttagtttggctaaatgtaaagatattgctgttttattgtttgtttttgcgagatgcgccgcaccattccgaagcaaaattcttaaaatgcactcttttagtgctaccgctggattactgtggtgcaactaggttgtactgatgctgtttcagggtttgccttgtataacaaagcaatagatgtgccaaagttggataggagaatattgttatccggataatgcactgatgccgcatccggtgagcgtgccgaaatatgggatgtattccggcacgataagaagggattatttacgtcgctgacgcagactcatcaacacagcagcaaaaccaaacaatgccgtcagcacccacagcggccagttgccggtacgtgcgtatggtgtgagtccggtggtcggcgtcacgttagtggttaacacctcgcgggtgaactgcgggatcatcgcctgaatctcaccctgcgggccaatcaccgccgtaatgccgttgttggtgctgcgcaacagtgggcgcgccagctccagcgcacgcattcgcgccatctggaagtgttgccatggaccaatagatttaccaaaccacgcatcgttggagatagtcagcagatagtcggtatccgggcggaagttatcgcgcacttgctcgccgagaatgatctcgtagcaaatagccgcagtaagctcaataccatttgcgctcagcggcggctggatatatggcccacggctgaagctgctcatcggcagatcaaagaacggtgctaacggacgcagaatgctctccagcgggacaaactcgccaaacggcaccagatggtttttgttatagcgatcggcactttcgtagctgtacggcgcacctttacccagcgtgatgatggtgttgtaggtatcgtagcggttctgcttattgagacgcgcgtcgacaatcccggttaccaggctgctacctttatcacgcaactcaccgtccagtgctttgaggaacggttgctgattaatttccagatcggttatcgcgctctccggccagataatcaagctacttttgcccatcagcggtgccgttgcgttgtagtaaatcttcagcgtattaagaagctggccttcgtcccatttcaggctttgcggaatatcgccctgaaccatgctaacctgaatggttttctccggttgtggggtaaaccactggatgtaacgcagcgggaagggaagggcaaacagcacgacggccaccaccagcggacgccagttgcgtttgaccaacgccagtgccagcaggccactaaccatcatcagcaggaagttaatggcttccacgcccattatcggtgccagcccttttaacgggccatcaatctggctatagccgaactgtaaccacgggaagccggtcagtacccaaccgcgcagaaactcggtcacttgccagagggcaggggcggcaatcgctacgcgcagccaggtggttttcggccacagacggctcagcacgccagcaaacagtccggtatacaggctcaaatacgccgccagcagcaccaccaggaagatgttaaccgggccaggcattccgccaaaggtcgcgatgctgacatagacccagttaataccgctgccaaagaggccaaatccccagcaaaagccaatagcggcagactggagtggacggcggttaaaggtcaacgcctgaagccccatcaggctaataatcgccgcaggccagacgtcgtaaggagagaaggccagcgttccgcaggcaccgaataataacgccagcagcaggcgaatgcgctggcgttcaattaaactggcaaaagccatgtagttatctatccagtttcggttttattcatccagcttcggctggggactgtcatccgggattttgacatgaacctgaataatacgccgactgtcggccatcgccactttgaactggtaaccgtcgatgtcgatagtttcgccacgcgccggaagatgcccaaatgcctgcatcaccagaccaccgatagtgtcgacttcttcatcgctaaagtgggtgccgaacgcttcgttgaagtcttcaatggaagccagtgcgcgtacggtccaggtatgacgactcagctgacggaagtcgatatcatcttcttcgtcatactcgtcttcaatctcaccaacaatcagttccaggatgtcttcaatggtcaccagaccggaaaccccaccgaattcgtcaataacgatcgccatgtggtaacgctgagagcgaaactctttcagcatccggtctacgcgcttactttcaggaacgacaaccgcctgacgtaacactttgtccatgctgaaggcttcagcatcgctgcgcataaacggcagcaagtctttcgccatcagaatcccttcaatgtgatctttgtcttcgctaatcaccgggaaacgactgtgggcggactcgatgatgacatcaagacattcgtccagcgtctggttgcgtttcagggtaatcatctgggagcgggggatcatgatgtcgcgaacgcgttggtctgcgatgtccatcaccccttcgagcatatcgcgcgtatcttcgtcgataaggtcgttctgcccggaatcacggatcagcgccagcagttcgtcacggtttttcggttcaccgtggaaaagttggctgagtaacagggagaaaaatcccttcttgttgcttatcgtgtcactactgtgactattgtcgtcgctcatggcgtcgtatgggttctcatgttagttaatcaaaacgccgtcgttaatcaccaacggcggggacgtctgccagtcaaatgcctggcaaattattctttctcggcaatgtacggatcctcatagcccagagcaagcataatctctgtttcgagggcttccatttcttctgcttcgtcatcttcgatgtgatcgtaacctaacaaatgcagactgccgtgcaccaccatatgcgcccagtgcgcctccagtggtttgccttgctcctgagcttccttctcaaccacctgacggcagataaccagatcgcccagtaggctcatttccatgccaggcggcacttcaaacgggaaggagagcacgttggtcggcttatccttaccgcgataggtcagattcagactgtggctttcggcggtatcgaccacgcgaatcgtcacttcgctttcttcctgaaactgcgggatcaccgcattcagccatgtctgaaactggctctcttccggtaacccggaattatcttcacatgccagttgtaaatcgaggatcacctgactcatttttgttcctgttcttcgcgcttgcgttctgctgccagcgccgcttttcgtttttgttcggcttcttcccaggcttcataggcgttaacgatacgcgccaccacagggtgacgaaccacgtcttcgctgtggaagaagttaaagctgatctcttcgacatcggccagcacttcgatggcgtgacgtaagccacttttagtattacgcggcaggtcgatctgtgtgacgtcgccggtgataaccgctttactgttaaaaccgatacgggtcaggaacatcttcatctgttcgatggtggtgttctggctctcatcgagaatgataaacgcgtcgttcagcgtacgaccacgcatataggccagcggtgcgacttcaataacgttgcgctcaatcagtttctcgactttctcaaagcccagcatttcaaacagcgcgtcgtacagcgggcgcagatacgggtctactttctggcttaaatcgccaggcaggaagcccagtttctcaccggcttctactgccggacgagtcagcagaatacggcgaatttcctgacgctccagggcatcaactgccgcagccactgccaggtaggttttacccgtacccgccgggccaacgccgaaggtaatgtcatggtcgagaatattggcgatgtactgcgcctggtttggcgtgcgcggcttaattacgccgcgtttggttttgatattgaccgctttgccgtactccggcacgctctccgcgctttgctccagtacccgcgcttctttaatcgcaaggtggatctgttccggttcgatatcctgaatctgaccgcgcatcggggcagtatcgacatacaggctacgcagaatgtctgccgcagcggtgacgcaaatcggacggccggtcagtttaaagtggttatcgcggcgattgatctcgatgccgagacggcgttcgagctgcttgatgttgtcatcaaacgggccgcacaggctcaacagacgcgcattgtctgctggctccagggtgatttcgcgagtgtctatgttcaaaccgttcctcttatctgtatgccgccggaagctgaacattcaccggcctataaggaaattattcacgccacaggaaaaaggcgcaagcattgcaataaagatggggataaagagagaaaaaacaaggcccaccggaacggcaggcctgagaattacggctgataataacccacgccaaggtcgttttctttgcgggtacgggcaatcacactttccggtgtttctgccacgcgcagacccatttcatcttcagtacgcaccactttaccgcgcagagagttcgggtagacgtcggtaatttctacatcgacgaatttaccgatcatatccggcgtgccttcgaagttgaccacgcggttattttccgtacgcccggaaagctccatgatgctcttacggcttgtaccttctaccagaatacgctgggtggtgccgagcatccggcggctccacgccatcgcttgctgattaatgcgctcttgcagaatatacagacgctgcttcttctcttcttccggaacatcatcaaccatatcggcggctggtgtacccggacgtgcagagaagataaagctgtagctcatgtcgaaattgacgtcggcaatcagcttcatcgttttctcgaagtcttcggtggtttcgccagggaagccaacgatgaaatcagaactgatctgaatatctggacgcgccgcacgcagtttacggatgatcgctttgtactccagcgccgtatgggtacggcccatcaggttcagaatgcgatcggaaccgctctgtaccggcagatgcaggaagctcaccagctccggcgtgtcgcgatacacttcgatgatatcgtcggtgaattcgatcggatggctggtggtaaagcgaatacgatcgatcccgtcgatcgcagcaaccagacgcagcagatcggcaaagcttccggtggtgccgtcgtagttttcaccacgccaggcgttcacgttctgaccgagcaggttgacttcacgcacgccctgagccgcaagctgggcaatctcaaacagaatatcgtcggacggacggcttacctcttcaccacgggtgtaaggcaccacgcagtaggtgcaatatttattgcagccttccatgatggagacaaacgcggtcggcccttcggcgcgcggttccggtagacggtcaaacttctcgatttccgggaagctgatatctacaaccgggctgcggtcgccacgcacggagttgatcatctccggcagacggtgcagcgtttgcggcccaaaaataatatcgacatagtgggcgcgctggcgaatgtgctcgccttcttggcttgccacgcagccaccgacgccgataatcaggtctggattcttctcttttaacagtttccagcgacccaactgatggaagactttttcctgagccttctcgcggatactgcaggtgttcagcagcagcacatccgcttcttccgccacgtcggtcagttgatagccgtgggtggcatccagcagatcggccatcttgctactatcgtactcgttcatctgacagccccaggttttaatatggagttttttggtcatcgacttgctcttgcgaaatagtagccaggaatgcagggcgcatagtgtaatgctttgctgccgttgtgaccagtatgagcgttatcagcccttaggggtaaaaatcctgtaaacttaaagcatattgctaacaggatgattgaccatgacaaatcaaccaacggaaattgccattgtcggcggaggaatggtcggcggcgcactggcgctggggctggcacagcacggatttgcggtaacggtgatcgagcacgcagaaccagcgccgtttgtcgctgatagccaaccggacgtgcggatcagcgcgatcagcgcggctagcgtaagtttgcttaaagggttaggggtctgggatgcagtacaggctatgcgttgccatccttaccgcagactggaaacgtgggagtgggaaacggcgcatgtggtgtttgacgccgctgaacttaagctaccgctgcttggctatatggtggaaaacactgtcctgcaacaggcgttgtggcaggcgctggaagcgcatccgaaagtaacgttacgtgtgccaggcagcctgattgcgctgcatcgccatgatgatcttcaggagctggagctgaaaggcggtgaagtgattcgcgcgaagctggtgattggtgccgacggcgcaaatagccaggtgcggcagatggcgggaattggcgttcatgcatggcagtatgcgcagagctgcatgttgattagcgtccagtgcgagaacgatcccggcgacagcacctggcagcaatttactccggacggaccgcgtgcgtttctgccgttgtttgataactgggcaagcctggtgtggtatgactctccggcgcgtattcgccagttgcagaatatgaatatggcacagctccaggcggaaatcgcgaagcatttcccgagccgtctgggttacgttacaccgcttgccgctggtgcgtttccgctgacgcgtcgccatgcgttgcagtacgtgcagccagggcttgcgctggtgggcgatgccgcgcataccatccatccgctggcggggcagggagtgaatcttggttatcgtgatgtcgatgccctgattgatgttctggtcaacgcccgcagctacggcgaagcgtgggccagttatcctgtcctcaagcgttaccagatgcggcgcatggcggataacttcattatgcaaagcggtatggatctgttttatgccggattcagcaataatctgccaccactgcgttttatgcgtaatctcgggttaatggcggcggagcgtgctggcgtgttgaaacgtcaggcgctgaaatatgcgttagggttgtaaccttacaacattgccggatgcgtgccaaccgtaggtcggataagacgcggcagcgtcgcatccgacattgaaggataagacgtgtcaacatcgcattcgacattgaatgaacgcagaaaagcaaaaagctcgccgaagcgagcttttttaatgtggctggggtacgaggattcgaacctcggaatgccggaatcagaatccggtgccttaccgcttggcgataccccaactgggtgcacttacaaggtaagcgtcttgaataaattggctggggtacgaggattcgaacctcggaatgccggaatcagaatccggtgccttaccgcttggcgataccccaacaaattggttttgaatttgccgaacatattcgatacattcagaatttggtggctacgacgggattcgaacctgtgaccccatcattatgagtgatgtgctctaaccaactgagctacgtagccagattgtttcttcgatggctggggtacctggattcgaaccagggaatgccggtatcaaaaaccggtgccttaccgcttggcgataccccaataaccgggcggtgaaccgcttactcgaagaagatggctggggtacctggattcgaaccagggaatgccggtatcaaaaaccggtgccttaccgcttggcgataccccatccgtacaacgctttctggtgaatggtgcgggaggcgagacttgaactcgcacaccttgcggcgccagaacctaaatctggtgcgtctaccaatttcgccactcccgcaaaaaaagatggtggctacgacgggattcgaacctgtgaccccatcattatgagtgatgtgctctaaccaactgagctacgtagccatcttttttttcgcgataccttatcggcgttgcggggcgcattatgcgtatagagccttgcagcgtcaacctctttttcaaggaaaattgctcgaaagtgactgtttggttaggttgcgaacagcgtggcgctatattcgtcaattattgtttactttgtgttttttcccaccctacagccattcttttgtcatacaggatgaaattcggaatttaacaatagtggtgggaaattaatctatgaaatactggcctacagtgatgagttgtcaaacagtgatgtggcaaacccggaacatttccttactgcatatcagaatcaacaagcacctcaataactgaaacagccccggatttcaccggggctgtttcgcatttcttacttatacgcgctctggtgaacaccaaccgcgcgaccagacggatcgtccattttcttgaacgcttcatcccattcgatcgctttagcggaagaacaagcgacggaaggaccgcccggcacgcactcagcggcgctcggaagcgggaatagttcttcaaagatctcccgatacaagtacgcttctttagaggttggcgtgttgtacgggaagcggaagcgggcagtttccagttgctgatcagaaacctgctgcgcagccacttctttcagggtgtcgatccaactgtaaccgacgccatcggagaactgctctttctgccgccaggccacgcttgcaggcagatacgcttcaaaacattcacgcaggatgtgtttttccattttgccgttaccgcacattttatcctgtgggttaatacgcatcgccacatcaaggaattttttgtcgaggaacggaacgcgtgcttccacgccccaggcactcatcgctttgttggcacgcgcgcagtcatacatatgcagggccagcagtttacgcaccgtctcttcatgcagttctttggcattcggtgctttgtggaagtaaagataaccgccgaacacttcatcagaaccttcaccggacagcaccattttaatgcccatcgccttgatcttacggctcattaaatacatcggtgtactagcgcgaatagtggtcacatcataagtttcgatgtggtaaatcacgtcgcggatggcatccagaccttcctgtacagtgaagtgaatttcgtgatgcaccgtgcccagatggtttgccacttcctgggctgctttcagatccggactacccggcagacctacagcaaaggagtgtaactgcggccaccaggcttcagagcgttcctgatcttccacgcgacgggctgcgtatttcttggtgatagcggaaataatactggaatccagaccaccagaaagcagcacaccgtaaggcacatcagacatcagatggcttttaacactatcttccagtgcctgacgcagctcgtttttgtcggtcacgttatctttcaccgcatcgtagtcgaaccagtcgcgatgatagtaagaacggatttcgccgtcctggctccacaaatagctccccgccgggaactctttaatcgtgcggcaaactggcaccagcgctttcatttcactggccacatacagctgaccgtgttcgtcataccccatatacagtgggatgatccccagatggtcgcgaccaatcaggtaggcatctttttcgctgtcgtacagtgcaaaggcaaacatgccctgcaagtcgtcgagaaattccggccctttttcctgatacagcgcgaggatcacttcacagtcagacccggtctggaactggtaacgatcgccatattcggcgcgcaatgcctggtggttgtagatttcaccgtttaccgccagtacgtgggttttttgttggttgtagagaggttgcgcccccgcgttaacgtcaacaatactcagacgttcgtgggcgagaatggcgttatcgctggcataaataccggaccagtccgggccacgatgacgcatcaggcgactcagctcgagggctttcttacgcagctcaactgcgtctgttttgatatcgaatacgccaaaaatactacacataaccttctccgttaacctggtatttgttgcttgttgtgtttgcttgtttaaaaaaatgccgcaaagcagcactgtgcgcaagcgatttggcggtgaaaaaataaaaaacgtaatggtgattgtcgattggtgaaaaaaggtctggtgtgaggatatatttattgatgaatcgataatttttagcgggttttattgaatgtttatattttacgggggccaaattgctgacaaagtgcgatttgttcatgccggatgcggcgtgaacgccttatccggcctacaaaagcatgaaaattcaatatattgcaggagctgcgtaggcctgataagcgtagcgcatcaggcagtttggcgtttgtcatcagagccaaccacgtccgcagacgtggttgctattcagataacgtcgatttcagcgacactcgggtaaatccagctggggcggaaaggcatactgtcgatatcgtcgaggctgctaacaccagaaagcaccagaatcgtctccagacctgcctggaagccggccagaatatcggtacgcaggttatcgccgacaatcaccgtttcttcgctatgcgcctgcattttgtttaatgctgcgcggatgatccacgggctgggcttaccaacatagaacggtttgcgcccggagattttctcaatccctgcacacaacgcgccacaagcgggataaaaaccgcgcccgtgggtgtccggattggtggcgataaaacgtgcaccgttagcgacgaaataggctgctttatgcatcatgtcccagttgtaggaacgcgtttcgccaacaatcacgaaatcagggttcacatcggtaatagtgaaaccggctttgtacagttcatgaatcagtgcgccttcgcccaccacatacgctttcttgccttcctggcgacgcaggaaatcggcagtcgccatcgcagaggtataaaacacgctgtcaggtacatcgacacctgcggtggcaaagcggttcgccagatcttgcccagtctggctaggatagttggtcagcaacaccagcggcaggcctttatccataatcccgtgcaaaaattccgctgcacccggtacggcgacgttatcgtgcatcagcacgccgtcgatatcgcaaattacatttttaatggtcatggactacccagaatattgacaacaataagcgccactataaaagcacattaattttccagcaaatgctggagcaaaataccgttgagcatggcgcgttttaccagcgcaaaagcgccgattgcgctgcggtgatccagctcagaacgtaccaccggcagattagtgcgaaacgccttcagcgcctgggtattaatgcagctttcaatagcagggagcagcactttatcggcttcggtgatttcaccggcaataacaattttttgcggattaaataagttgatagcaatggcgatggttttacccagatgacgaccgacatactcaattacttcgctcgccagactatcgcctttgttcgcggctttgcagatagttttgatggtgcagtcgtccagcggcacgcggctctggtagccctgctttaacagattcaacacccgttgttcaatggcagcgttggcagcgatagtttccaggcagccaaagttgccgcagtggcagcgttcacccagcggttcgacctgaatatggccaatttcaccgacgttgccgttgcggccaataaaaatgcgcccgttagagataatcccggccccggttccgcgatggacacgcaccagaatggagtcttcgcaatcctgacttgcaccgaagtagtgctccgccagcgccagactacggatatcgtgaccaacgaaacaggtcactttaaaacgttcttccagagcttctaccagcccccagttttctacctgaatatgcggcatgtaatgaattttgccgctgtccgggtcaacaagccctggcaggatcacgctaatcgcgatcagctcgcgcagtttgcgctggtagctatcaataaactgagcaatggcattcaacagggcatgttccagcgtttgctgggtacgttccggcagcgggtaatgttcttctgccagcactttgctgctgagatcaaacagagtgatggtggcgtcatgacgaccaagccgtacgccgattgcgtggaaattgcgggtttcggtgacgatggagatagcgcggcggcccccggtggaggcctgctgatcaacttctttgatcagcccgcgttcgataagctgacgcgtaattttggttacgctggcgggggcaagctggctttgctcggcaatctgaatccggctgattggcccgtactggtcaatcaggcgataaaccgccgcgctgttaagctgttttacgagatcaacattacctatctgagcttgtccgcctggtgtcatactttctcttattgagttacgacctcgttaccgttaacgatggtcttggtgattttaaaatcaggtgtgaatgcagtcaggttggctactttacctgcggcgagtgtgccgagacgtttctcaacgccaatcgcacgcgccggatagagcgtcgccatacgtagcacttcatccagtgcgataccgcaatgttcgaccagattacgcacgccttcaatcatggttaaggaactaccgcttaacgtaccgttctcatccacacaaagtccgttacggtagtatattgttttacccgcaaaaatgaactgttcaatgttggcacctgctggcgcggtggcgtcagtaaccagacacagtttgtcgcctttcagacgtttagcgttgcgaatgttggcgtaatcaacatgcaggccatcagcaataataccgcaataaatgtcagcttcgtcgaggatcgcgcccgccaggccaggttcacgaccggtaatatacggcatcgcgttgtacagatgggtggcaaaggtaatccccgcgcggaaaccggcttttgcttctttcaacgtcgcgttggagtgaccggcagaaaccacaatcccggcatttgccagtttgctgatgacttccgcaggaaccatttccggtgccagggtcactttggtaatgacgtcggcgttttcacacaggaaatcgaccagcgcggcatcaggcttacgcacaaaattcggattatgggtgcctttttttaccagattcagccacggaccttccagatgcagacctaacgcctgattcggatgttttgccaggtactcgcgcataacgcgcacgccctgtttcatcagctcatcgctggtggtgataagcgtcggcagatagttagtacagccacttttctcattggctttctgcatgatttccagcgtttccacgctgaccgcttcagcggtgtcgttaaactgtacgccgccgcagccgtttaactgcacatcgataaaaccgggggagagaatggccccgttcagactacgttgttcgatctctggcggcagttccgctaccggacagacgcttttaatcaggccatcagcgataacaaccgcgtggtcatcaagaaattcgtggccggtaaagatccggccctgggttaatgcatacattctgacccccgattttaaaaaatattgccctgagcaaggagccagggcagggataacaattacagacctttgatattttctgcttctaattcattgaaatatcttaaagtcttaactttcagctccatggtggaaggttcatcgcacaccatgatcgctttcggatgcagttgcagacagctgatggtccacatatggttcacgcaaccttcaacggcggcctgcagcgccagtgctttctggctacccagcaccagaatcatcacttcttcggcatccagcagtgtaccaacaccgacagtcagggcatattttggcacctgattaacatcgttatcaaagaaacgagagtttgcgacgcgagtgtcatgagtcagggttttgatacgagtacgagaagccagagaagacgccggttcgttaaatgcaatatgaccgtcgttacctacaccgcccataaacagatgaatttttccgtaagaacggattttttcttcatactggcggcactcggcgtcgatatccggggcgttgccgttgagaaggttgatgttttctgctggaatatcaacgtgatcgaagaaattacggtgcataaagctgtagtagctttccggatgctctttcggcagaccgacatattcgtccatgttgaaggtgacaacgtgcttaaagctgacctggcctgctttatgcatttcgactaacgctttataggtggtcatcggcgtgccgccagtcggcaggcccagtacaaacggacgatcggcagtcggtttgaacgcattgatacgattgacgatatggcgagcagcccatttgccgacctgttcagcggtagtcagggggatcagtctcattattcacctcaataagtaaaatgtaagccgttggcggattaggcatctttaagcgtaacctggatttgcgcagacaggcgtcaatccgacctgattttttgaatgataaaataagttttctggtttagccagtaaaagggagtgataataacgatatttggtgacaaaactcacaaaagacacgcgtttaatttgcgatacgaattaaattttcacacactctgtagcagatgatctaacaatctgattacagaacatcggcagtacaatttgcagcaaaataaaaatacggcttgaaacgagccaaatagggttctcgtagggggaataagatgaatattttaggttttttccagcgactcggtagggcgttacagctccctatcgcggtgctgccggtggcggcactgttgctgcgattcggtcagccagatttacttaacgttgcgtttattgcccaggcgggcggtgcgatttttgataacctcgcattaatcttcgccatcggtgtggcatccagctggagcaaagacagcgctggtgcggcggcgctggcgggtgcggtaggttactttgtgttaaccaaagcgatggtgaccatcaacccagaaattaacatgggtgtactggcgggtatcattaccggtctggttggtggcgcagcctataaccgttggtccgatattaaactgccggacttcctgagcttcttcggcggcaaacgctttgtgccgattgccaccggattcttctgcctggtgctggcggccatttttggttacgtctggccgccggtacagcacgctatccatgcaggcggcgagtggatcgtttctgcgggcgcgctgggttccggtatctttggtttcatcaaccgtctgctgatcccaaccggtctgcatcaggtactgaacaccatcgcctggttccagattggtgaattcaccaacgcggcgggtacggttttccacggtgacattaaccgcttctatgccggtgacggcaccgcggggatgttcatgtccggcttcttcccgatcatgatgttcggtctgccgggtgcggcgctggcgatgtacttcgcagcaccgaaagagcgtcgtccgatggttggcggtatgctgctttctgttgctgttactgcgttcctgaccggtgtgactgagccgctggaattcctgttcatgttccttgctccgctgctgtacctcctgcacgcactgctgaccggtatcagcctgtttgtggcaacgctgctgggtatccacgcgggcttctctttctctgcgggggctatcgactacgcgttgatgtataacctgccggccgccagccagaacgtctggatgctgctggtgatgggcgttatcttcttcgctatctacttcgtggtgttcagtttggttatccgcatgttcaacctgaaaacgccgggtcgtgaagataaagaagacgagatcgttactgaagaagccaacagcaacactgaagaaggtctgactcaactggcaaccaactatattgctgcggttggcggcactgacaacctgaaagcgattgacgcctgtatcacccgtctgcgccttacagtggctgactctgcccgcgttaacgatacgatgtgtaaacgtctgggtgcttctggggtagtgaaactgaacaaacagactattcaggtgattgttggcgcgaaagcagaatccatcggcgatgcgatgaagaaagtcgttgcccgtggtccggtagccgctgcgagtgctgaagcaactccggcaactgccgcgcctgtagcaaaaccgcaggctgtaccaaacgcggtatctatcgcggagctggtaagcccgattaccggtgatgtcgtggcactggatcaggttcctgacgaagcattcgccagcaaagcggtgggtgacggtgtggcggtgaaaccgacagataaaatcgtcgtaagtccagccgcagggacaatcgtgaaaatcttcaacaccaaccacgcgttctgcctggaaaccgaaaaaggcgcggagatcgtcgtccatatgggtatcgacaccgtagcgctggaaggtaaaggctttaaacgtctggtggaagagggtgcgcaggtaagcgcagggcaaccgattctggaaatggatctggattacctgaacgctaacgcccgcagcatgattagcccggtggtttgcagcaatatcgacgatttcagtggcttgatcattaaagctcagggccatattgtggcgggtcaaacaccgctgtatgaaatcaaaaagtaatctgctttatgcctgatgcgacgcttgagcgtcgcatccaacaatgacaagcggtggagatcttctctgccgctttttttttcatcaatcatccccataatccttgttagattatcaattttaaaaaactaacagttgtcagcctgtcccgcttataagatcatacgccgttatacgttgtttacgctttgaggaatccacgatgagtgaggcagaagcccgcccgactaactttatccgtcagatcatcgatgaagatctggccagtggtaagcacaccacagtacacacccgtttcccgccggagccgaatggctatctgcatattggccatgcgaaatctatctgcctgaacttcgggatcgcccaggactataaaggccagtgcaacctgcgtttcgacgacactaacccggtaaaagaagatatcgagtatgttgagagcatcaaaaacgacgtagagtggttaggttttcactggtctggtaacgtccgttactcctccgattattttgatcagctccacgcctatgcgatcgaactgatcaataaaggcctggcgtacgttgatgaactgacgccggaacagatccgcgaataccgcggcaccctgacgcaaccgggtaaaaacagcccgtaccgcgaccgcagcgttgaagagaacctggcgctgttcgaaaaaatgcgtgccggtggttttgaagaaggtaaagcctgcctgcgtgcgaaaatcgacatggctagtccgtttatcgtgatgcgcgatccggtgctgtaccgtattaaatttgctgaacaccaccagactggcaacaagtggtgcatctacccgatgtacgacttcacccactgcatcagcgatgccctggaaggtattacgcactctctgtgtacgcttgagttccaggacaaccgtcgtctgtacgactgggtactggacaacatcacgattcctgttcacccgcgccagtatgagttcagccgcctgaatctggaatacaccgtgatgtccaagcgtaagttgaacctgctggtgaccgacaagcacgttgaaggctgggatgacccgcgtatgccgaccatttccggtctgcgtcgtcgtggttacactgcggcttctattcgtgagttctgcaaacgcatcggcgtgaccaagcaggacaacaccattgagatggcgagcctggaatcctgcatccgtgaagatctcaacgaaaatgcgccgcgcgcaatggcggttatcgatccggtgaaactggttatcgaaaactatcagggcgaaggcgaaatggttaccatgccgaaccatccgaacaaaccggaaatgggcagccgtcaggtgccgtttagcggtgagatttggattgatcgcgccgatttccgcgaagaagctaacaagcagtacaaacgtctggtgctgggtaaagaagtgcgtctgcgtaatgcttatgtgattaaggcagaacgcgtcgagaaagatgccgaaggtaatatcaccaccatcttctgtacttatgacgccgataccttaagcaaagatccggcagatggtcgtaaagtcaaaggtgttattcactgggtgagcgcggcacatgcgctgccggttgaaatccgtttgtatgaccgtctgttcagcgtgcctaacccaggtgctgcggatgatttcctgagcgtgattaacccggaaagcctggtgatcaaacagggctttgctgaaccgagcctgaaagatgcggttgcgggtaaagcattccagtttgagcgtgaaggttacttctgcctcgatagccgccattctacggcggaaaaaccggtatttaaccgcaccgttgggctgcgtgatacctgggcgaaagtaggcgagtaattttaagtttcgctatgccggatggggcgtttacgtcgcatccggcaaggaacagacaaacagtttcaaacgctaaattgcctgatgcgctacgcttatcaggcctacatgatctctgcaatatattgagtttgcgtgcttttgtaggccggataaggcgttcacgccgcatccggcaagaaacagcaaacaatccaaaacgccgcgttcagcggcgttttttctgcttttcttcgcgaattaattccgcttcgcaatttatccataaaataaatttaaaataacaaaacataattaaataaaatgtaaccgctttcatcttgctggaatttcacgcttttattcttctgcaagcctttcaaccgcaaacttaagccttgtaacaaaaatcatcaaaatatgtgcggttgctcatgttcttacattctggttacagaaagagattgataattcgcgtcgcgaaaaatagtctgttcctgtagtcagcgagacttttctcaacgctacttttttaatttttattttttcgctgttcacctttggtgcagcaatttatacgtcaaagaggattaacccatgcgtacgtttagtggcaaacgtagtacgctggcgctggctatcgccggtgttacagcaatgagcggctttatggcaatgccggaggctcgcgccgaaggattcatcgacgatagtaccttaaccggcggtatctattactggcagcgtgaacgcgaccgtaaagatgttaccgacggcgacaaatacaaaaccaacctttctcactccacctggaatgccaacctcgattttcagtccggttatgctgctgatatgttcggccttgatattgctgcgtttacggcgattgaaatggcggaaaacggcgacagctcccacccgaacgaaatcgcgtttagtaaaagtaataaagcctatgacgaagactggtccggcgacaaaagcggtataagcctgtataaagctgcggccaaatttaaatacggtccggtttgggcgagggcaggttacattcagccaactggtcaaacgctgttagcgccgcactggagctttatgccaggtacttatcagggggcggaagccggggcgaattttgattacggcgatgctggtgcgttgagtttctcctacatgtggaccaacgaatacaaagcgccgtggcatctggaaatggatgagttttatcagaacgataaaaccaccaaagttgattatctgcactcctttggggcgaaatacgacttcaaaaataacttcgtactggaagcggcatttggtcaggcggaagggtatatcgatcaatattttgccaaagccagctacaaatttgatatcgccggtagcccgttaaccaccagctaccagttctacggtacccgagataaagttgacgatcgcagcgtcaacgacctttatgacggcaccgcctggctgcaagcgttgacctttggttaccgggcggctgacgtagtggatttgcgcctcgaaggcacctgggttaaggctgacggtcagcagggatacttcctgcaacgtatgactccaacctacgcttccagtaacggtcgcctggatatctggtgggataaccgttctgacttcaacgccaacggcgaaaaagcggtcttcttcggtgcgatgtatgacctgaaaaactggaatcttccaggcttcgccatcggcgcttcctacgtttacgcatgggatgctaaacctgcgacctggcagagcaatccggatgcgtactacgacaaaaaccggactattgaagagtctgcctacagcctggatgcggtctataccattcaggacggtcgcgccaaaggcacgatgttcaaactgcatttcaccgaatacgacaaccactccgacatcccaagctggggcggtggttacggcaacatcttccaggatgagcgtgacgtgaaatttatggtaatcgcaccattcaccatcttctgatgcccgacgcggcaggttttgtgcctgccgcacgtttgaggaatttgctatgaaaaaactgattctcatcgccataatggcaagcgggctggtagcttgtgcgcaaagtaccgcgccacaggaagacagtcgtctgaaagaggcatacagcgcctgtatcaacaccgcacaaggtagcccagaaaaaattgaagcctgccagagcgtgttaaacgtgctgaagaaagagaaacaacatcagcagtttgccgaccaggaaagtgtacgcgtactggattatcagcagtgtctgcgtgcaacgcaaaccggaaatgatcaggcggtgaaagccgattgtgataaagtctggcaggaaatacgcagtaataacaaataagtgagagctgtaactctcgcttttcttatttcccttgcataaaaaagccaacccgcaggttggcttttctcgttcaggctggcttatttgccttcgtgcgcatgttcatcttcgcggcaatcgccttcggcacagtgaccgtaaagatagagactgtggttagtcaggcgaatgccatgttttgcggcaatttcacgctgacgcgcttcgatggaatcatcactaaattcgataaccttgccgcagtcgaggcagatcaggtgatcgtggtgatgttgctgtgtcagttcaaatacggatttaccgccttcaaaattgtggcgggtgacgataccagcgtcgtcaaactggttcagtacgcgatataccgtagccagaccaatttcttcacccatatcgatcagacgtttgtataaatcttccgcactgacgtgatggttgtccggctcctgaagaacttccaggatttttaaacgaggaagcgttactttcaggccagctttctttagggcggtattgttatcagtcatgcggaatctgtcctgttactaagcggttcacttcattagaagaagtgacagaatttgctcttgagataatgcgtatcattatagaattgccacgcctaaatgaaaaccacaagtccctggcaaatattgttaataaaaacgtggcacagcttacatttacaacggcaaggccacttgaacaccgggacattgtacaggtacaacagcaaaagttacaaatttgtagcaattattttgattggcattatctattaatacggcgtagacatgagtctacgccgcatcacatcaggcattgagaatttcgtcgagatgcaactcttcagaaatctgtttaacccatttttctacacgttcagcggtcagttccggctgacggtcttcgtcgatagccagaccgacaaagtggtcgtcatctgccagacctttacttgcttcgaaatgatagcccgcagttggccagtgaccaacgatggttgcaccgcgcggttcaatgatgtcgcggatggtgcccaatgcgtcgcagaaatattcggcgtaatcttcctggtcaccacaaccaaacagcgcaaccagtttgccgttgaaatcaatctcttcgagagtcgggaagaagtcatcccagtcacactgcgcttcgccgtaataccaggttgggatgcccagcagcagaatgtcataagcttccagatcttctttgctgctttttgcaatgtcatggacatcggcaacgtctttaccaagctgtttttgaatcatttttgcgatattttcggtattaccggtgtcgctgccgaaaaagatgccagtgatagccatgagtgaaataacctcttgaaacttattgaaatgggggtggaaaattgcccacggataaaggcaatcatagcagaacaggcagtcttgcggaatcagcaaacgagcaggactgcacactgtgctacatgaaagtggaaatttaaacgatgccctgactacgcagcgccgccagttgctgcattaacatctcttcgatcagttcgctacggctcatattgcggctctccgccagctcgttcagcgcctcgacagcttccgcgttcagcttcagttcgacacgcttaaggccacgtactttgtcgcgttttagctggttgcgtttattaatacgcagctgttcatcgcggctaagcggattagttttcggtcgtcccggtcgacgctcgtgcgcgaacagatctaatgtcgtacggtccgtttgttctttggccatgatcttggtgacttcgggggaaacaatcagccaggcctctgcccggatggatagcgcgccataatacatcagcgcgatgagtcacgccaacgcccacgcgcggaaagcgacgcggacgctgggtttttaatcagttgcgttaatcattgagatagcgacggatagcgcgtaataccgcatccggtttttcagcatggacccagtgacccgcgcctgcaatcacatgcgcccgtgcctgtggaaattgagccagtaaatcatcacggtactgctcgctaacatacggagaattgccgccagggataaacagggcagggtgatcccatgccgggattttctcccaacctacaatatgcggatactgatcccacaataccggcacgttaaagcgccactccccgtcaacaaaagatttcagcagaaactgaatcaccccttcttcattaagatgctggcgcattattgctgctgcttgctggcgagtttgtgcgtcgctttcactgaccgcgttgatagccgcaaaaatctcatcatgacggcgtacgtgatagtcgaccggcgcgatatcgatcgccaccagtttatcgatgcgatcggaggctagtgcagtaagtgccattaccgctttaccgcccatggagtgaccgataaatgttgctttgtcgatctgctgtgcatccagagtatcaacaagatcctgcgccatcgccgggtaattcattaccggatctctcggactaagaccgtggttacgcatatcaacctggatgatattgtgatcgtttaccagatcgcgagccagtacgccaaggttgtcgaggctgccaaacagaccgtggacaagaacgatgggagaattattgtgctggttttgtgcagtttgcgcgcggatattcaatttcatggcaaagttctttttttcgcgttgtcgggttagggtattatgttgaccattgtgccacagggctgcaacaaataaggtttattccgagtttttctgcaagccaggcttgacgctatccgctgccgggatttattcatatactcctggcgacttgtattcagctaagacactgcactggattaagatgaaaacgattgaagttgatgatgaactctacagctatattgccagccacactaagcatatcggcgagagcgcatccgacattttacggcgtatgttgaaattttccgccgcaagtcagcctgctgctccggtgacgaaagaggttcgcgttgcgagtcctgctatcgtcgaagcgaagccggtcaaaacgattaaagacaaggttcgcgcaatgcgtgaacttctgcttagcgatgaatacgcagagcaaaagcgagcggtcaatcgctttatgctgctgttgtctacactatattctcttgacgcccaggcgtttgccgaagcaacggaaagcttgcacggtcgtacacgcgtttactttgcggcagatgaacaaacgctgctgaaaaatggtaatcagaccaagccgaaacatgtgccaggcacgccgtattgggtgatcaccaacaccaacaccggccgtaaatgcagcatgatcgaacacatcatgcagagcatgcaattcccggcggaattgattgagaaggtttgcggaactatctaaaacgttgcagacaaaggacaaagcaatggcaatccacaatcgtgcaggccaacctgcacaacagagtgatttgattaacgtcgcccaactgacggcgcaatattatgtactgaaaccagaagcagggaatgcggagcacgcggtgaaattcggtacttccggtcaccgtggcagtgcagcgcgccacagctttaacgagccgcacattctggcgatcgctcaggcaattgctgaagaacgtgcgaaaaacggcatcactggcccttgctatgtgggtaaagatactcacgccctgtccgaacctgcattcatttccgttctggaagtgctggcagcgaacggcgttgatgtcattgtgcaggaaaacaatggcttcaccccgacgcctgccgtttccaatgccatcctggttcacaataaaaaaggtggcccgctggcagacggtatcgtgattacaccgtcccataacccgccggaagatggtggaatcaaatacaatccgccaaatggtggcccggctgataccaacgtcactaaagtggtggaagacagggccaacgcactgctggccgatggcctgaaaggcgtgaagcgtatctccctcgacgaagcgatggcatccggtcatgtgaaagagcaggatctggtgcagccgttcgtggaaggtctggccgatatcgttgatatggccgcgattcagaaagcgggcctgacgctgggcgttgatccgctgggcggttccggtatcgaatactggaagcgtattggcgagtattacaacctcaacctgactatcgttaacgatcaggtcgatcaaaccttccgctttatgcaccttgataaagacggcgcgatccgtatggactgctcctccgagtgtgcgatggcgggcctgctggcactgcgtgataagttcgatctggcgtttgctaacgacccggattatgaccgtcacggtatcgtcactccggcaggtttgatgaatccgaaccactacctggcggtggcaatcaattacctgttccagcatcgtccgcagtggggcaaagatgttgccgtcggtaaaacgctggttagttctgcgatgatcgaccgtgtggtcaacgacttgggccgtaaactggtagaagtcccggtaggtttcaaatggtttgtcgatggtctgttcgacggcagcttcggctttggcggcgaagagagtgcaggggcttccttcctgcgtttcgacggcacgccgtggtccaccgacaaagacggcatcatcatgtgtctgctggcggcggaaatcaccgctgtcaccggtaagaacccgcaggaacactacaacgaactggcaaaacgctttggtgcgccgagctacaaccgtttgcaggcagctgcgacttccgcacaaaaagcggcgctgtctaagctgtctccggaaatggtgagcgccagcaccctggcaggtgacccgatcaccgcgcgcctgactgctgctccgggcaacggtgcttctattggcggtctgaaagtgatgactgacaacggctggttcgccgcgcgtccgagtggcacggaagacgcatataagatctactgcgaaagcttcctcggtgaagaacatcgcaagcagattgagaaagaagcggttgagattgttagcgaagttctgaaaaacgcgtaaacacatttaataaaaaaagggcggtcgcaagatcgcccttttttacgtatgacaaacacagaattgcctgatgcgctacgcttatcaggcctacgaggatggtgcaatatattgaatttaagcgattttgtaggccggataaggcgttcacgccgcatccggcaaaaacaacgaacactttgtcaacaaactgagtagctcaaggaaatcccaatgaagaccaacaggagtctggtcgtcatagtgagtctaattaccgccacattactgctgactgcatgcgcccaacctgaacaaagtagtttagctggcgactggttactgacccctaaagataaaaccagaggattaacgggtagcattgcggtaaatattgcacctttccggtgtaagacaaattgccgtggtgataacttacctgataatacccgccgctggcagttgagtggcgggaacgaaaaagaacttacttatcttcataatatgagtgcacaagaaaaggtcggtttaaatcccggttggcaatgctacaccagtttttttatgcgggtttgccagggcaagcccggcactcgaccgatagtcaatgaggattatgtcagcgaaagcggattttttggcagcatgatgcatgtcgggattattgagttacgacgctgccagagtgaaaattgccagcaagaattgaaagcgataaatacacattaaaatagtgagtccgggaatgaaacccggacctgaacatgtcttattgcgtgaatgtttctttcatttgatactgcatttcccagagttcagtaaggctaataacttttcttgttcttgcttcttcactttgtacccataagaaagggtagaacgtgaaggcttccgttgcgcttaattttattacgtcttctcgccattgctgccatcgtacattttcatagaaggtatctaaatcaccggataatgcccactgaagaaactcagaatatccaacttccagactttcccaattcagcgtatctggcgcaaaataataaacgcagccagtatcttccccaagatcgccaccattaagagcaaaaattacccctgcgacatcgtcagcgatgggtaaagcccgcacgcctgcgaattcagggcgttgtgtccaacttactggatctcgtggcaaccgggggtgaccagatcctgctatgcgtaattaaccattatcaatcagcagacctccggagccatagacaagcgcacccatcggactttttgttgtcacctgtaattgataaagtgcggtttcggctaaatctttattaaccggtaagagttcggtatggtttgtggcgtcttttaaccagttctggattattggccaggcactatcttcagtatttactaactgattcatttcacgcatcgctacttgctccttgtgtgctacggtgtcatttatgatgaggaattgtatggaacattttttaaatattaagttccttatatttgaataaaaaatgactttatccatacattgccacttttttcaaagcataaaccgatacccaataccggtttcagtaataaaatggcgaggccgggccggatcctgttccagtttttgtcgcagatgccccatataattacgcaaatagttgctgtgttcgatcgcgtttagaccctacatctgccggatgcggcataaataacgaactatttgccaacaaacagaaagggcgatcattcaatcgcccttttttactttgttttattaaccgtgtttatttttcagttcaaagcgtggacttaccagaccatacagtgtccaaccaaggaaggtcacgatggaaccgtacagcatggcttcttccccggaactgtacagcgcataaaagctatacatcgcgccaacaaaagcaacaaagtttgcaactttcgctttactggggggcacattagcgaccttctgaataatgactaatgccgccatactcagaatatacggaatgatattggtcaccacggccaggttaaccagcacgttgaactgactgtttaggctcgggctaatggtcatcagtgccaatccactctgaataatcacaatggtcaacattccctgcaccggtgcatccactttggttacacgggagaaaattttagggaagtagccttcatcagaactagatttaaacacctgggcaatggtgaactgccagccaagtaggctaccgcagcaggacatcaccatcagcgccataatgactttacccacttccggcgtgaacatctgcgcgaaggccagaccaaatggtgccgtactatttgccagctccatatttggcacaatcccggcaatcacgttggtggagacgatataaatcaccgccgcacctaacgtaccgccgagtaccgcgattggcacattacgttccgggttttccactacatcagtattcgcacacgcagactccagaccaagaaaagcccacagcgtcatagcgatggaagaacctaccgcactgaagaacggtgcatgatgcggattccaggaatcaacgtacagcgtcgggctaaaccagaaccagccaataatgcacagaccgacgaccggaataatgaccccccacacggtaatgctactgatttgcccggtaatgcgcgcaccaccaaagttagccacggtacaaatccacagcaccccgatggtcgcaagaccaatctgcactgggctcaaactcgcgccgagcagttcggtgccgtaaccaaccgcgctaatagcaatcgcgacgttagcaatcagcagactgacgccgtaggtatagttcgccataaagttaccggatttaccgaaagcatactcggcataaccgcccataccgccacttttacggctgaacataccgcattttgcgaatgcccatgccagtgccatactgcctacggctgtcaccagccaggagataatactgattgtcccgacttcggcaagctttgtcggcagcatgatgataccggagcccatcatgttgaccatcgtcagtatggttaactgaacgacgcccattttgttgcttttagcctgactcataatttttcccctttcaacagggtgctttgcgcatcacgaggcttgatgacatagcaccaaacttgcttacgaccatcatgttcttcgatatagacaccctgcagctccggtgcaaaacctggcagcaggttgatcccttcttccagagcgctgaagtaacgcagaacagcaccaccccagatttcacccggaacaacacacagcacacccggaggataaggaagcgcaccttcggcagcgatacggccttctgcatccggcagacgaaccagttccacttcaccgcgtaaataggcgtagttggcttcttgcggattcatgctgacgcgtgggaagtgctccttacggaacatctctttttgcagttgtttcacgttgtggcgggcatacaaatcatgcatttcctgacacaactgacgcagggtataaccggcgtagcgctcttcatgctgtttgtagatggaaggtagcacttctgctaatggcgcgtcggactcaagcagtttttcgaagcgtaccagcagggcaacaagttgctgaagtttggccatatcttctgccggagtcagcaggaagaggatggagttaagatcgcatttttccggcactacgccattttcgcgcaggaagttagcaagaatcgtcgcgggtacaccgaacgcttcatattcgccgttacgtgcatcaatacctggggttgtcagcaacagtttgcatggatcgacaaagtattgattctctgcatagccttcaaaagaatgccagtgttcccctggtacaaactggaagaagcgcagatcaaccgcaatttgcgctgtttcatagctctgccagggtttaccatccaccagttcaggtacgaacggacgaatatgctgacagttatcgaggatcagtttgcgggcattaatgccatttaccacacaatccatccacatattacgaccgctgacaccttcatgcattttggcgttgatattcagtgcggcaaacagcggatagaacgggctggtggaggcgtgcatcataaaggcgttgttcatgcgtttgtgcggtacataacgctgttgccctttgatgtggctgtcttttttatgaatttgactagtctgagaaaaaccagcctgttgtttatgcacagattgcgtaaccagaatacccggatcgttctcattaagatccagcaacagcgggctacagtccgccatcatcggaataaactgttcatagccgacccatgcactgtcaaacaggatgtagtcacacagatgaccaattttatccaccacttggcgggcgttataaatcgtaccgtcgtaggtgcctaactgaatcacagcgaggcggaaaggacgagcctcttttgcccgctgcggtgcgacttccgcgatcagctcacgcaggtaactttcttcaaaacagtgcgcatcaatgccaccgataaagccatacgggttacgtgccgtttccagataaaccggtgttgcaccagcctgtagcaacgctccgtggtggttagatttgtggttattgcgatcaaacagcaccagatcacccggtgttagcagggcgtttaaaaccactttgttagaagaactagtgccatttaaaacgaagtaggttttatcggcattaaacacttttgccgcatgttgctgtgcaatgcatggcgcgccttcgtgaatcagcagatcgcccatcgctacgtcggcgttgcacaagtcggcacggaacagcgcctcaccaaagtattccacaaactgattccccgccggatggcgacggaaaaattcgccgccctgatgaccagggcaatcaaacgcgctgttaccttgattgacataatcgaccagtgcgcggaagaaaggtgggcgcagttgagtttcataatggctggcagcggtttctaactggcgaccataaaattctcgtcggctttcgcaattctcaaagacaccgctaatacggggcaaatactctgcgggtacacgttcttgattttcagtagcaataaataccgggatgccataacccgtggcatcgatttcatcgagttttccgcatgtaacatcgttgaggcttaaaactattgccgccacatcgatattacgactttcattaatgtagatacattctcgctgcgtggtaaaacagtccgggcaagaatcactaaccgcaatttttaatttactcatttttcatctctttattttaggtaatagcaggtcctcaatttctcgaatgagaaatcgatcgtgccggaaaaaagcaaagttaccccgctgataaataaatcaggtagattgcttttttcagaatgcagaaacccttaccagtcaggtggctgataatacaagggttaacagagaatgagcactgcggaatacaggcatatgcctgtaatacagagagtcaggaagacctgtacgctgaagtgcccttagtcggtagactaacgggcattgaagaagtgaaagtcgaagctattgcgatgagcaaacttcataatatgagttgtccgccttatatggggcatagtgcggctgttattttccatttaatttacctttcctgatgtgaatgaaggtgaagatattctatccaggaaatacggttgaactgtgaaggtgatcaataaaaaatgatcaatcttaatttatttaatgatgagctttttactcagtaatataaaatattgaattgttatttttgtgtgttgtttaagataaaaagccgtatttattattacggctttaattaataaaaggcaggctgtattaaaattaatattcaaagcataaaccgatagccaataccggtttcagtaatgaaatggcgtgggcgggcgggatcctgttccagtttttgtcgcagatgtcccatataaatacgcaaatagtgactgtgttcgaccgcgtttggcccccacacctggttaaggagctggcgctgggtgagtacttttccggcattgttgagcagcaccgccagcaggcggaactcaattggtgtgagatgcacctcttcctcaccccggtgaatcacgcgggcggctaaatcgacggtaacatcggaaaattttaccagcggatcgggcgcggtggtggcagagtggcggcgtaatgcgacgcgcagacgggcctgcaattcgccaatgccaaacggcttactcagataatcatccgctccggcatccagcgcggcgattttgtcgctctcttcgctgcgtgcggaaagcacaatcaccggcaccgcgctccactggcgcaggtcgcggataaactcaatcccatcaccatcgggcaggccgagatcgagaataatcaaatctggcttacgggttgccgcttccagcaagccgcgttgcagcgtttcggcctcaaagacgcgcatcccgtcgccctccagcgccgtgcgcagaaagcgacgaatagcctgttcatcttcaacaatcagaacgtttgtcacatatcctcatgaaattcttcaagttcaggggcagtttgctggggaagtgtaacacgaaaacaggcaccaccttccggtcggttgaacgcggtaatagtgcccccgtgtacatccactatcgcccgacaaattgccagtccaagccctacccccggtactgcgctctctttattcccgcgagcaaacttatcaaatatcgtctgctcctggcctggcggaagaccggggccgttatcccagacatccagttgtagattttcgccctcaacgtgggcatcgataccaatttcggcctgcgcacccgcatatttcaccgcgttctccagcagattaatcagcacccgttcaaagagtggcccgtcaacgtggattaaggtcagcggttctggcagagaaagattgatggggctgcttaaacccggttccagcatttgcagcgcgctgccgactacttcttccagcgttaaccactctttcttcaaattaaagccgccggactgaattcgcgccatatccagtagattattcaccagtcgggtagtgttcagcacatgctgacggatctcgctggcctggcgggcgtggggacttccttcgcttgccagatcgagcgttaagatttctgcctgaccaaacagcaccgtaagcggcgtgcgtaaatcatggctaagcgccgccagcagggcgttgcggatctgttcacgttcgcttgccatccgcgcctgttcttcgctggcggttagcgtcagccgctcaagggcattggcgactaacagcgtaaacgtctccagcaggcgctgctgttccgggatcatcaactggcgcagattccccggctccaccaccaccagcccgtaggttttctcgccgctttttagcggcaaaatctggtacggtacaccgggtaacgtgtcggtgcccgcgcccgcaggcaggcctttatcaaaactccactgcgcgatggcatcgtcccacggcgtcattccttgcggatgtgttaacggctgcaatttaccgttgtcatcgggcaacaacacctgactgcgggcatgaaacgtggaggcaataaattgttcgctggtggcagcgatatcctgcggactgcggcccaccgccagagctttgctcatttcatataagtgccgtgtgcgttgctcgcggtaacgggctacccgcgcctgataacgcacgccagcagtaaggttcccgatcaccagcccgacggttaacatcaccgcgaaggtcagcagatattgcacatcagagacggcgagcgtgccgcgtggggcgataaaaaagagatcgaaactcactacattaatgacggtggcaaccacactaggccagcgtccataaaatagcgccaccaccaccacgccaagcagatacagcatcaccaggttggcggcatcaaacgccatcagccactgcatggcaattaaggtgataacggcgcataacgcggcggcaaccacgcatccctgaatttgtacacgccacttgtctttaaaagagcggttatccggcgcgttgttaatcgtgcgggcgggtggttcatcaagcgcgaccagcacctgatcgagatcgggggcgatgcgcgccagtcggtcagcaaacgtttcccgacgccaccagcggcggctggccgggcgaccgagaataatcttgccgagattatgttcacgggcataacgcactaccgctttctcttccgctggatcagaaagtgttgccgtctccgcgcccagttcctgcgccagacgtaaggcgctgagaattgcccgacgttttttttccggtaagcggtgcagggcaggggtttcaacatacaccgcgtgccagacgctacccagccgactcgccagccgcgccgctgcgcggaccagtttttcgctgccggtgttatggccgatgcataaaaggatcgcgtcgcgcgtgtgccacactttctcttcgccaggatgcccccgccaggcgcgcatttgctcatcaacgcgatcggcagtacggcgcagtgccagttcgcgcagggcgatcagattacctttgcggaaaaaatgttcaatggcgcgctccgcctgcccggcaatatagactttgccttctttcagccgctggcgcagatcgtccgggggcaagtccaccagcaccacgtcgtcggcggcatcgaaaaaaggatcgggcacggtttcccgtacctgaattccggtgacgccgctgaccacatcattcagactttccagatgctgaacgttgacggtagtgaaaacatcaatgccagcttccagcagttcttcgatatcctgccagcgtttgggatgacgggaacctggcgcattactgtgcgccagttcgtccattaagatcagcgccgggcggcgggcgagggcggcatcgagatcaaactcgctgatatgccgcccacggtacgcctggcgttttaacggcagaacagccagcccttccagcatggcggcggtatcttttcgcccgtgggtttctaccacgccaaccacaatatccagcccttgcgcccgcagtcgctgggcttctgccagcatcgcccaggtcttcccgacgcctgcacaggcaccgaagaaaactttcagcttcccccgatgcggcgcggcagtttgttccagcagacgatcggggtcgggacgtaagggttcgttattcatcaagtttatccagcgccagattgagttcaacaatgttgacaaccggctggccgatatatttcaccagcggttgttggctgtattttgcgatcagttgcgtgagctgttcaacgctgagattacgcgctttcgccacgcgtgggatttgccaggccgccgcttgcggggtgatattattgtccagcccgcttgcgcttgccgtcaccagttcaaccggaacgctcgcgctggcatccgggttagcggcccgtaatgcagcaacgcgtgcggctattagtttatccagctcagggttactgaccgccagattgctcccgccagaagcctgtggattatagggcatttctgccgttgcgctcgggcgaccatgaaaatagccgttgccggtaaaattctgcccgattaatgcgctaccgcgcaccgtatcaccttcacgaatcaagctaccattggcctgccagggaaaccaccattgccccagtacggtggtcagcagcgggtaaacgccgccagtaatcaataacagaaagataaatgtacttaatgccggacgtaatccactcatggtaaacctcacaccagaccgcaaacggtcagcagtaaatcaatgactttgataccgataaacggcaccagcagcccacccagaccgtaaatccataagttacggcgcaacatggcagaagcggtaagcggtttataactcacgccttttaacgccaggggaatcaaaaagacgataatcaaggcgttgaaaatcaccgcactgaggattgcggagtcggggctatgcaggcacatgatgttcagcgcatttaactgcggatacgttgccgcgaatgccgccggaataatggcgaagtatttcgccacatcgttggcaatgctgaaggtggtcaggctgccacgggtcatcagcatctgtttgccaatgtgcaccacctcgatcaacttggtcgggttagagtcgagatcgaccatattgcccgcctctttcgccgcctgggtgccggagttcatcgccaccgcgacatctgcctgcgccagcgccggagcatcgttggtgccgtcgccggtcatcgctaccaaacgaccttccgcctgatactgacggatcaatgccagcttggcctccggtgtcgcttcggcgagaaaatcatcgacacccgcttccgcagcaatcgcggcggcagtcagacggttatcgccggtaatcatcaccgttttaatgcccattttgcgcagctgggcgaagcgctctttaataccgcctttgacgatatctttcagcgcaataacgcccagcacacgagaaccttccaccaccaccagcggcgtggctccctgacgcgcaacctgatcgactttttgatcaacatcggtagggaagtgaccaccgttagcctcaacatggcgacgaatggcatcgacagaacctttacggatcatgcggttgtcgatgttgatcccgctcatccggctttgcgcagtaaacggtacaaaggtggcatggaggctctgcacatcgcgctcgcgcaggttaaaacgctgcttggcgaggatcacaatactgcggccttccggcgtttcatcagccaggctagccagttgtgcggcgtcagccagcgttttttcatccacgccctgcgcggggataaactcgctcgcctgacggttaccgagtgtgatggtgccggttttatccagtagcagaacgtcaacgtcacctgccgcttcaactgcacgtccgctggtggcaatcacattcgcgcctagcatccggctcatcccggcgacgccgatcgcactcaacaggccgccaatagtggttgggatcagacagaccagcagcgccaccagtaccgttacgctgactgcattaccgccccacgcggaaaacggccacagcgtggcggttgccagtaaaaagacgatagtcagggcaatcagcagaatggtcagggcaatttcgttcggcgttttgcgtcgctgtgcgccttccaccatcgcgatcatccgatccagaaatgtctcgccggggttaacgctacactcaatcaccagccagtcagaaagaatacgcgtgccgccggtgacggaggcaaaatcgccgccggattcacggatcaccggtgcgctttccccggtgatggcgctttcatcgacgcttgcacccccttcaataacttcaccatcgcaggggataatatcgccagcttctaccagtacgatatcgcctttacgaagttggtcggcaggaactttgtccgccgcagcgccatatttcggctcacgcagcttgcgggcaaaggcagtttttttcacccctttcagactgttggcctgcgctttactgcggccttctgccagcgcctcggcgaaattagcgaacagtacggtgatccacagccaaccgctaatggccgcgctaaacagcgcattgccgggcatcgcaccgcttgccatcgcgatgctaatacaggtggtcagcagactgccgatccagacgataaacatcaccggattgcgccattgcgcctgcgggtttaattttttcaccgcttctttcagcgcctgaacgacaagtgttggttcgaatagcgccagttgtttacgactcatattcagtgctcactcaatatcatcaggagagatattccgccaccggaccaagcgccagggcagggataaaggtcagtgcgccaaccagcaacacggtgccgattaacaggccaacaaacagcgggccgtgcgttggcagcgtgccggagctggcggcttggctctttttactcaccaggctaccggcaattgccatcaccgggataatcaccccgaagcgaccgacaaacatgcagaacgccagtaaacagttccagaacggagagttggcgcttaatccggcaaaggcgctgccgttgttgttagcggcggaactcacggcgtacagcacttcgctaaaaccatgcgggccagggttgagcatggcgctacgtccggcgtcggtcatcatcgccaacgccgcgcccatcagcaccagcgtcggggtaaccagaattgccagtgcagtcagtttcatctcgcgtacgtcgatttttttacccagatattccggtgtacgaccaatcatcagcccggcaataaacaccgccagcaggacaaacagcatcatgccgtaaagaccagaaccgacaccgccgaacaccacttcaccaatttgcatcagccacatcggcaccatgccaccgagagcggtaaagctatcatgcatcgcaatcaccgcgccacaggaagccgccgtcgtcacgaccgcaaacaggctactgaccagcacgccgaaacggctctctttaccttccatattgatgctgctgtccgtgcccagtgccagcagatgaggattaccctgaacttctgcccacatcaccacgcctacgcagatgacaaaaatcacactcatcgcccacagcaacatgcgcccctggcggcgatcgcccatcacttcaccaaaggcaaagcacagcgccgttgggatcaagaagatcgccagcatctgcacgaagttggtcagtgcggttgggttttcaaacggatggctgctgttggcattaaagaagccaccgccgttagtaccgagcatcttgatcgcttcctgagaagctacaggccccatgggtaacagctgttgcgctccttcaacggtattcacagcctgataaggcagaaagttttgcagcgcaccttgttgaataaaaaacagtgcaatcaacaacgccacagggactagcacccataacgtgatgcgtagcagatcgacccaggcattcccgagcgtgctcatgctctggcgggtaaacgcacggatgagggcaaaaatcaccgcaatcccgctggcggcagaaagaaagttttgcaccgttaagcccgccatctggctgaaatagctcaacgtggtttcaccgctataagattgccagttggtattggtgacaaagctgacggcggtattcagcgccagatcccagctcagccctggcaactgctgtggattaagcggcagatagtgctgaccgagcaacataaaaaacagcaccgccagccccagcatgttcaggccgagaatggcacaaagatattgcttccagttcatctcacggtcagagacgccaagtgcgcgaaaaagtacgcgctcaacgcccgttgtaccgggaagaggaatgtcattaatcagccgcgccagcccgctgcctaaaggacgcgccagcaccattaacaccagtaaaaacgtggcgatcagtaagaacccttgcgcagccatcagaacgcctccgcattgatcagggcataaaccagataacccagtaataaaaacaccagcaatacgccggttatcacgcctgcactcacagtgcacctccagtggcctaaaagtgataccggaagggtagaattctggctgcaaagatttcgcaaaaatctgcgggcggggtgtaaaaaaagtataaaaatggcaaaagccatgatttaactaatgtttagtattaatttaacttttgtgtaacttaattacaggatgaatgtaaataaaccatcaataagcaaaaataagtggtcggatgagtagtaaaattacacaaaaggcggtactattttcatcagataaacaaattcatttttccggtgccattcaccgggtagatacaaaagggggagaaaagtatggaactctacagagaatatcctgcatggcttatctttttacgccgtacttatgcggttgcagcgggcgttctggcgctgcctttcatgcttttctggaaagaccgcgcccgcttttacagctacctgcatcgcgtctggagcaaaaccagcgataaaccggtgtggatggatcaggccgaaaaggcaactggtgatttttattgattgctgagttttgaatacattgaacgtctacacttactcctgtaaaccgctcaggagcagtaatgaatctacaacgatttgatgacagcaccctaatccgtatctttgcccttcatgagttacatcgactgaaagaacatggcttaacgcgcggggcgcttctcgattatcacagccgctataaactcgtctttctggcgcattctcagccggagtaccgcaaacttggcccgttcgtggctgatattcaccagtggcaaaatctggatgactattacaaccagtaccgccaacgcgtagttgttttgctttctcaccccgccaacccgcgcgatcacaccaatgttttgatgcacgttcagggttattttcgcccgcatattgattccacagaacgccagcagctggctgcgcttatcgacagttatcgccgtggcgagcaaccacttcttgcgccgctgatgcgtatcaaacactatatggcgctttatcctgacgcctggcttagtgggcagcgttatttcgaactttggccgcgtgtgattaacttgcgccatagtggagttttatgactacccatctggtctggtttcgccaggatttacgtctgcacgataatctcgcactggctgccgcctgccgcaatagctctgcacgcgtgctggcgttgtatatcgctacaccacgccagtgggcgacgcataacatgagcccgcgtcaggctgaacttatcaatgctcaactgaatgggctacaaatagcgcttgcggaaaaaggtattcctttattgttccgtgaagtggatgactttgtcgccagtgtcgaaatagttaaacaggtgtgcgcggaaaacagcgttacccacctgttttataactatcagtatgaagtgaatgagcgggcgcgggatgtggaagttgaaagagcgctgcgtaacgtggtgtgtgaaggatttgatgacagcgtgatcctgccgcctggcgcggtgatgaccggtaatcacgagatgtacaaagtctttacgccttttaagaatgcctggctgaaacggctgcgggaagggatgccggagtgcgtcgctgcgccaaaagttcgtagtagcggaagcatagagcccagcccatccattacgctgaattatcctcgtcagtctttcgatactgcgcattttccggtggaagaaaaagcggcgattgcgcaattacgccagttttgccagaacggtgccggagaatatgagcaacaacgagattttccggcagtggaaggcaccagccgtttgagcgccagcctggcaacgggcgggttaagccctcgccagtgcttgcatcgcttgttggctgaacagccgcaggcgctggacggtggggccggtagtgtctggcttaatgagctgatctggcgcgagttttaccgtcacctgataacgtatcaccccagcttgtgtaaacatcgtccatttattgcctggacggatcgtgtacagtggcagagcaatcccgcacatttacaggcctggcaggaaggcaaaacgggatacccgattgttgatgccgctatgcgtcagcttaacagcactggctggatgcataacaggctacggatgattacagccagttttctggtgaaagatttattgatcgactggcgcgaaggcgagcgatatttcatgagccagctgattgatggtgatttggcagccaataacggtggctggcagtgggccgctagtaccggaaccgatgcagcgccgtattttcgtattttcaacccgacaacccagggcgagaaatttgatcatgagggcgagtttatccgccagtggctaccggaactgcgcgatgtgccagggaaagtggtgcatgagccgtggaagtgggcgcagaaagcaggtgtgacgctggattatccgcaaccgatagtcgagcacaaagaagcgagagtacaaacgttggcagcgtatgaggcggcgcggaaggggaaataacagacgcgtcaggcaatcgagcccagatgccggatgcggcgtgaacgccttatccagcctacaaatttgtgcaaattcaataaattgcaggaaatacgtaggcctgataagacgcgtcaagcgtcgcatcaggcatcggtgctggcctattaagactccagcgccagcgcgcggtttctgaatttcagcgcctgatacagccaaatcatcagtaccagtcctacacacgccagtgcgccccaggtaatttgatcaaatacttcaatatatgcattgatggagtagttgatcgccccggaagcatcaaagctagcctggcttgtctgatcggcaatcacgcccgccagatagttcgcgatcgcgccagaaagcagcatgtagatgccggttaatacgccggtcacaccggggatttcaatgcgcgtaatttggctcatggcaaccgggtcgataaacagttccgcaaagcccatcaccgccaggcctaataccatcagtggcagagaagagtgaccatacattgcggaccagcgggcgcttaaggtcagaatgcagaatccggcgctcatcaggccaaggccaagagcaaatttcccccagatgcgcacggtacgattacccgcgacactctcttttaccacccacgccaggaacacaccgcacagcataactgcgaaggcattaatgctctggaacatcgcggtcggaacggtataaccaaacatatcgcggttaacgaagcggtcgatataaaggctaatgctgctaccgccctgttgtgcgaaggcccagaacaacatactgaagaaggtgagcgtcacaatcagccccagctccttccgctgtttctggttttctgctttgcgataaatttttgccagtacacccaggccaataatagtcgcgacaattaaggcgtatacgctccactctttccagaacagtatggtaatcagtgcaggcgttgccaccagcagaaccagcagccatccccagttcggcaggagaaagtttgtcgcacgcagtacttttttgttaacgccgcgggtatgagtgaaatgacgattgccacataagaaaatgaccagacccgcgatcatgccaaccgccgccaggccaaagcccatcgcccagctgtactcttcctgggcgtaaccacaggcgataggtgcgataatagaccccacgttacccgccgcatacatcaggctgaaaccgccatcacgacgcggatcggttggctcatacagctcgccgagcagacagcttacgttagatttaaacaggccatagccgcagacgataatcgccagggacagatagaggaaactcggatggatctcactggcacccagcaccacatgaccgatcgccatcaacaacgcccccagcatcaccgccatgcgattgccgagaactttatccgccaaaaagccaccgaggattggcgtgacatacaccaggctacagtaggcgctaaataactcgtaggcgtgagtatcgttgtattttagttgattggtgagatagagaatcagcagggcacgcatgccgtaaaagctaaaatattcccagatttgcagcgcaacgacatagtaaatagcgcgcggctgacttgcgtgtttattcataataattccacaattgacggcaacgtcacgtaatagttgcgcggcgtgcttgtgtttccttaaagttaaaactttgatacagatctgattatttatgcaatatgctgtctgattgcataaatatacattagctgaagcgtgatgatataaacaatttgcgtcttttggcgtcgggtttgtttcttaatatgtcaaaagattggctatcgacgaactggcgaggtaacgctatgttaacggtgtagctatcagaatacggaaggcgcgaagatgaaaaacaccgaactggaacaactgattaacgaaaaactgaacagcgcggcgattagtgattacgcgccgaatggtttgcaggtggaaggcaaagagacggtgcaaaaaattgttaccggtgtcaccgccagccaggctttgctcgatgaggcagtgcgtctgggcgcggatgcggtcattgtgcatcatggctacttctggaaaggagagtctccggtcattcgcggaatgaagcgtaaccgtttaaaaacgttgctggcgaatgatatcaacctgtatggctggcatttgccgcttgacgcacatcctgagctgggcaataacgcacagctggcggcgttactggggatcacggtcatgggcgaaattgagccgttggtgccgtggggcgaactgaccatgcctgtgccgggactggagctggcttcctggattgaagcgcgtctgggacgtaagccgttatggtgtggcgataccggacctgaggtggtccagcgcgtcgcctggtgcacgggcggcgggcaaagttttatcgatagcgccgcgcgttttggcgtggatgcttttattactggcgaagtttctgaacagaccattcatagtgcccgcgagcagggattgcatttttatgctgcaggtcaccatgccactgaacgtggtggtattcgcgcattgagcgagtggctgaatgaaaataccgatcttgatgtgacctttattgatattcctaatcctgcataacgaataatcagagggatcgaaagtgcaacgagcgcgttgttatctgataggtgaaacggcggtagtgctggaactggaaccgccggtgacgctggctagccagaaacggatctggcgactggcgcagcgtctggtggatatgccgaatgtggttgaagccattcccggcatgaacaatatcacggtgattttgcgtaatcctgagagcctggcgctggatgccatagagcgtttgcaacgctggtgggaggagagcgaggcgctggagccggagtctcgctttattgaaattccggtggtttacggtggtgcaggcggaccggatttggcggtggtcgcggcgcattgcgggttgagcgaaaaacaggttgttgaattgcactcctccgtggaatacgtggtctggtttttaggttttcaaccgggcttcccgtatctcgggagtttgccggaacaactacacacgccacggcgcgctgaaccgcgcttactcgttccggcaggttctgtcgggatcggcgggccgcagactggtgtttatccgctggcaacgccgggtggctggcagttgattggtcataccagtctcagcctgtttgatccggcgcgtgacgaacccatcttattacgtccgggagacagcgtgcgctttgtaccgcagaaggagggagtatgctgaagattattcgtgcgggcatgtataccactgtgcaggatggcggtcgtcacggttttcgccagagcggtatcagccactgcggcgcactggatatgcccgcgttacgcattgctaacctactggtgggtaatgacgccaatgcccccgcgctggagatcacgctcggtcagttaactgttgagttcgaaactgatgggtggtttgctctgacgggtgccggttgcgaagcgcggctggatgataatgccgtctggaccggctggcgattgccgatgaaagcaggccagcgtttaacgcttaaacgcccgcagcacgggatgcgcagttatctggcggtcgcgggtggtattgatgttccgccggtaatgggcagttgcagcaccgatctcaaagtggggattggcgggctggaaggccgtttactgaaggatggtgaccgactcccgattggcaaaagcaagcgtgattctatggaagcgcagggcgttaaacagctgctgtggggcaaccgcattcgcgccttgccggggccggaatatcatgagttcgatcgcgccagccaggatgcattctggcgtagcccctggcagcttagcagccaaagtaaccgcatgggctatcgcttacaggggcaaattttaaaacgcaccaccgatcgcgaactgttatctcacggtttgttaccgggcgtggtgcaggtgccacataacgggcagccgattgtgttgatgaacgacgcacagaccaccggtggttacccgcgtattgcctgtatcattgaggctgatatgtaccatctggcgcaaattccgctcggtcagccgattcattttgtccagtgtagtctggaagaggcactaaaagcacggcaagatcagcaacgttattttgaacaattagcgtggcggctgcacaatgaaaattgacctgaacgccgatctgggcgaaggctgcgccagcgacgcagagctattaacgctggtttcctctgccaatattgcctgtggatttcatgcaggcgatgcgcaaatcatgcaggcttgcgtgcgtgaagcaataaaaaatggtgtcgcgattggcgctcacccgagttttcccgacagggaaaattttggtcgcagcgccatgcagctgccgccagaaaccgtttacgcccagacgctgtatcaaattggcgcgctggcaacgattgcccgtgcgcaaggcggcgtaatgcgtcatgtcaaaccgcacggcatgttgtacaaccaggcggcgaaagaagcacaactggcagacgccatcgccagagcggtatacgcttgcgatccagcattgattctcgtcgggctggcgggaagcgagctgattcgtgcaggcaagcaatatggtctgacaacgcgcgaggaagtgtttgccgatcgcggttatcaggctgacggcagcctggtgccgcgaagccagagtggcgcgttgattgaaaacgaagaacaggcgctggcgcaaacgctggagatggtgcaacacggcagagtcaaaagtatcaccggcgaatgggcaacggtcgcggcgcaaacggtctgcctgcatggcgacggcgagcacgcactggcgttcgcccgccgactacgctctgcatttgccgaaaaggggattgttgtcgcagcataaccccgattaataaagaatgaaaaaaggatatcaccatgcctgaaggcccggagatccgccgtgcagcggataacctggaggcggcgatcaaaggcaaaccactaactgatgtctggtttgccttcccgcagttaaaaccttatcaaagtcaacttatcggtcaacacgttacccatgtggaaacgcgtggtaaggcgttgttaactcatttttccaacgacttaacgctctacagccataatcagctttacggcgtctggcgcgtggttgataccggcgaagagccgcagaccacgcgagtattgcgggtaaaactgcaaacggctgacaaaaccattctgctttatagcgccagcgatattgagatgttgaccccggaacaactgaccacgcatccgtttttacaacgcgttggtcccgatgtgctggatccgaatctgacgccggaggtggtgaaagaacgattattgagcccgcgctttcgtaaccgtcagtttgctggattactgctcgatcaggcgtttctggctgggcttggcaattatttgcgggtggagatcctctggcaggttgggttgactggaaatcataaagcgaaagatctcaatgcggcgcaactggatgcactcgcacacgcgttactggagattcctcgattttcctacgctacgcgggggcaggtggatgagaataagcatcatggggcgctgtttcgctttaaggtttttcatcgagatggcgaaccgtgcgaacgttgtggcagcatcattgagaaaaccacgctgagttctcgcccgttttactggtgccctggctgccagcattaagcgctccgcttcggcgcataggtactaataaaccgcgcaatggcaggccctgtcagcaaaatactgaacaggcgtagggtttgcatcgccataatgagcgccatatcggcattgctccctgcggcgatgaccgccacggtatcaagcccgccggggctggtggcgaggtaggcagtcataaaatcaatgtgcataaaccgggtcagcccccacgccatacccgcacaaatagccagcagagcaaaaatgctcagcaggatttgcggtagcgggcgtagtgcccgcagtaagatttgtttatcgaaaccaagaccaatccgccagccaattgccatatacgccatcgccagcagccattccggtagttcgatggtgatgagctgaccagactggagcactgcgcccgccagcatcgggatgagcatcgtgccggaaggaagacgcagcaggcatcccactgtaccggcaacgaccgcgagcaaaatagtaagcaggagattaatgctcactggcgggaaccagacgatatgctggttaaccgcttcagcgttatcgcccagcatcatgcgggtgaccagaacagcggcccccgcgacgaacagcactcgcagatattgcataaacgccaccaggcgaatatctgcgccgtaatcttgcgccatagcgaccattgccgccgcgccgccaggagaggagccccaggcaccggtatttccaggcaaactgctatagcgcaccaataaccaacccacaatggcgctggaaagcagcgttaccagtaaaattgcaagcacgatcggccagttgacggccagggtggtgagaatgctaccagtgaggttttgcgcaatcatgcagccaagaatggcctgggcggcgagaaaagcagagcggggaagttgcagagtaattccgcgcatactaaagatgatcccggcgatcatcggcccaagtaatagcgccgccgggagatgtaccgcgaggaaaccaatagaaaggagaagacttagcacacataacattccccactgcaaaactggcatccttcgctccctcattattttctctttggtgtatcgatacagcataaagaaagctgggccaggaaaaaataacagcaatcaaggaaaaggggaaaatcagcaattttctgaaagagatgccctttccggcggcaaagggcatcatggtaaatcagttatagttaatcttaaaaagcaccactgtatcgaaggggccagcctcgatgggggtgcctggaatggagctaagttcagccgtataggttttttcgtagaccaacatgtcactggtgaaatcggcgtattcagcatatttattgaaggtataagggctggcgttttcatccagtaaacgtagcttcagaccattaccaatcaacaatgctttatcttcttcaaccaacgtttcttcggtataaaaggaggaactgactttaaatccgtcggtgcattgatcgttttggctcttggtcgttttaatactgaacgttttgctcattgtgtggcgacgtatatccagcaaattaaatttaccaaaatcaatcacctgtgtttccggactaatggaaaaattgacgctgcaatccagcacgcgaatgttttccagaccagtaatatgatatttcaggttttgggcagtagggtcttcgttaacgctaccggcaccgtcaaattgcacgacgatatagtcgctaagcgtactttgataatcatgcggcggcatttctcgtattttgacgtataaccgcatgcgagcgagaaaggtacggctcatatgaatattagcgggatcgccgctgcaaattttgttctgccatcccatcgcgatgatctgctcaggggtataaatatcaatgttcttactgtcgatacactggttagtgtcgatgcgactttttcccagactggcatcgtaatcgacaccgttgtatgtcacgccgagttgataataacgatcctgcacccccggataggggtttacccaggcgtagacatgctcgctttcaaagttgccgttggtattgttgtcacaatagacgggaattttaatatcgtcagattcccagatcttatcaccgggtttggcattgcctggtacagcaaacggttgaatcgcttcacttttttctactgcgccaccagatgtaccaaaatagcagttcagcgccattgcagacttcaacggcagaaataacaggcagatgacgagcaacaatcccttgccagcactcatttcgcctccactgcttgtaaacggcattgtccgctgcagttgagcgtcgtcatgcgtaatgcgccgtaatcatccatgtaaccgagataaaactggctgccgctataacttccggtgtttgtgttgaccgtactaaaaggtgcaaccatcacggttttgaagcctgggagaacgcctttttcatttctccccagataggcaatggtcagataatacgcggtaggatttttcagtgtcagttggttgccctgctggctgacctgtaactgcagttcgaccttttctcctgctttcttgcgtaatgcagccggtcgccagaacaatttaatacgactttgaatagcgacctgaagtatcgcatggtcgctgcttttatccggagcgggaggaatttcgcgcatattgtagaaaaatagcgtttcgcgatcgccaggtaattgtgtggtactggcttgtttcacaacccgcacctggcttgtcgctttcggttccagacgttgaatagggggcaaagcgaccagaagagcatcgcttttctcccctttttcattttctatccaggaataagcaagataaggcagtttgtcactttggttttcgatacgcaggctggtggctttgtcattggcgttaaacacaatgcgtgtgcgatcgggttgcaccgcagcattgcaacccaagctgatggttaacaacattaagggtaatcctttaataaatgtcattctcttttccttaattaatgacaaggtaaaatcaggcgtttggtcgtgtcttccagacgttctggcagatgaataatgcagctttgctcaccccagaccacggtaaacagttgattttcagcgacaccgcttaaccaggcatgtccttcctcgccaaccatacccacgctaatgccgctgtcatcctggcggatatccgcaccgaggggagggaactgaccgctggcgttgcgtatgatgacgttaacgtctttaccggaacgggaagccagacttttgtaacctatcgcgccttcaatccatgtttccttgatgacgttttctgcaactgttacgccgtcgggtaagtcattcatgttcaccgccacggtggaaggctggtaactggaaatcaacggcaccaccgcaatgccaaaatggttggtgtagtcgagattgccctgaaccggaatatctgccacgccatcggtgctgaccatcaggcgtggttcattggtggagctgcggcgatgaaatgctgcaccatattgggttgcggtgaaagaaccgctccagctgctgctgacggaactgtaatcactggcggcataggtaccagaaatatcccactcacccgcactactcaggtgctgatagttaccgctcacctgggctccattgtccggacgatcggattgcagtccggcagacatgccccagctattacgttcatccagcgtatcgttccagctcatgcggtgtatggtgctgtggctactgttttgcatgtcatagccaacccgaccaccgttaccgaaggggaggctaatgctcagataaatctggttgtcgcgatctttatcttcgtagtgggtcgtattgaaactcgtgctaatgctgatatctctccagtcaccaatatcaacattaaaacctgctgtgatgttggcggtcgtggaggcgtctgcattccaccaggtttgatgtagcaggttggcgtaaagattgaggtttagtggggtaatcggttggcccacggataagctgatcgtctgtttttcgtcctgcgcatcgctgtcgttgtatttgtgatccagatagttggcgtagctgtgaaaatgacgatcactgaagcgataagcggcgaggctaatcgtgctgttggtggcatccacttgtttgctgtaattaaaacggtagcttaagccccgctcgtcctgctgagtatcaaaatggctactggcccaggtgacatcaaaggacagtgcgccaagccacagcatattttgcccgatacccattgcggcagaatggtagtcatcatcagaaatcagcaggccgccgtacaggctggtgttactgagcatcccccaggaaacttcattgctaaaaaaggtttcattttcagtttgatgactcatggaaggccgtggctgacccgcggccaatttatagcgaacctgtccctggcgagtcaggaagggcgtgcttgctgcgctaacctggaaattgttcacccgaccatcttcttccgtcactttgacatccagcgtgccctgaacagactgattgaggtcatcaataataaacgggcctggcgggacttttttctggtaaatgacgcggccactttgactgatcgtcaccgtggcattggtctgtgcaataccgctaatttgtggggcgtagccacgcagctcccacggtaacattcgatcgtcactcgccagtgccgcgccggtataagaaaaaccatcgaaaatattggaactgaaatcggtttcgccgagggttaacttagagcctaattgcggtaatggacgaaaaagataggtgcggcttattccgccactctggtcatggttatcttcgctatcggtcttattaagctggtaatcactgcgtaagcgccatgccccggcgttaattccggcggtaccgtaggcattcaggttagtgctgctgctgccgtcctgtgggcggtagctgctggcaaacaagttgtaatccatcaggacaccggcaacaccttctttccatgtagaggggggagcccagttttcactgtgccacgccagccaggcttgcggaatactaatattcagttgctgattggcttgatcgaaattgaagagcatttcaggtcgggaactgaaatcaatacaccgatctatctgtggcaaggactgacggatatctggttttaaaccaaatttatcgaccagactatcattgatgcatggaatggttttgtcaccctttttttgccagttaattttttgcccattactgattttgttgttattcaccgcaacgctaacaaaatattcaccgggagcaatgactcctttttcctttaataaactaatatcaatgcggtcgcgcatacttttatcgagaacattcagattgaattcgaccgccattgcgcaaggcatcgccatgaccaggcaggatacaaaagagagtcgataaatattcacggtgtccatacctgataaatattttatgaaaggcggcgatgatgccgccaaaataatacttatttataatccagcacgtaggttgcgttagcggttacttcacctgccgtgacatcgactgcattatcaatttgttccatccaggcgaaaaagttcagcgtctgttcactactgcttgcatccaggtcaagatctggcgcggcactacctaatacgatgttaccgtcatttttgtccatcagtcgtacaccgaccccagttgcttcgcctgcactggtgttgctcaacaaaggcgtagcaccagttgtcttagccgtgctatcgaaggttacgccaactttggataccggcattccgctaccgttgtcagaagcaggcagatcacagttgatcaagcgaatgtcgacggccactttattgctatgatgctcccggtttatatgggttgtcgtgacttgtccaagatctatgtttttatcaatatcttctggatgaatttcacaaggtgcttcaataacctcccccttaaagtgaatttcgccagaaccttcatcagcagcataaacaggtgcagtgaacagcagagatacggccagtgcggccaatgttttttgtcctttaaacataacagagtcctttaaggatatagaataggggtatagctacgccagaatatcgtatttgattattgctagtttttagttttgcttaaaaatattgttagttttattaaatgcaaaactaaattattggtatcatgaatttgttgtatgatgaataaaatataggggggtatagatagacgtcattttcatagggttataaatgcgactaccatgaagtttttaattgaaagtattgggttgctgataatttgagctgttctattctttttaaatatctatataggtctgttaatggattttatttttacaattttttgtgtttaggcatataaaaatcaacccgccatatgaacggcgggttaaaatatttacaacttagcaatcaaccattaacgcttgatatcgcttttaaagtcgcgtttttcatatcctgtatacagctgacgcggacgggcaatcttcataccgtcactgtgcatttcgctccagtgggcgatccagccaacggtacgtgccattgcgaaaatgacggtgaacatggaagacggaatacccatcgctttcaggatgataccagagtagaaatcgacgttcgggtacagtttcttctcgataaagtacgggtcgttcagcgcgatgttttccagctccatagccacttccagcaggtcatccttcgtgcccagctctttcagcacttcatggcaggtttcacgcattacggtggcgcgcgggtcgtaatttttgtacacgcggtgaccgaagcccatcaggcggaaagaatcatttttgtctttcgcacgacgaacaaattccggaatgtgtttaacggagctgatttcttccagcattttcagcgccgcttcgttagcaccgccgtgcgcaggtccccacagactagcaatacctgctgcgatacaggcaaacgggttcgcaccgctagagccagcggtacgcacggtggaggtagaggcgttctgttcatggtcagcgtgcaggatcagaatacggtccatagcacgttccagaatcggattaacttcatacggttcgcacggcgtggagaacatcatattcaggaagttaccggcgtaggagagatcgttgcgcgggtaaacaaatggctgaccaatggaatacttgtaacacatcgcggccatggtcggcattttgctcagcaggcggaacgcggcaatttcacggtgacgaggattgttaacatccaggctgtcgtgatagaacgccgccagcgcgccggtaataccacacatgactgccattggatggctgtcgcgacggaaagcatggaacagacgggtaatctgctcgtggatcatggtatgacgggtcaccgtagttttaaattcgtcatactgttcctgagtcggtttttcaccattcagcaggatgtaacaaacttccaggtagttagaatcggtcgccagctgatcgatcgggaaaccgcggtgcagcaaaataccttcatcaccatcaataaaagtaattttagattcgcaggatgcggtactagtgaagcctgggtcaaaggtgaacacacctttactaccgagagtacggatatcaataacatcttgacccagcgtgcctttcagcacatccagttcaacagctgtatccccgttgagggtgagttttgcttttgtatcagccatttaaggtctccttagcgccttattgcgtaagactgccggaacttaaatttgccttcgcacatcaacctggctttacccgttttttatttggctcgccgctctgtgaaagaggggaaaacctgggtacagagctctgggcgcttgcaggtaaaggatccattgatgacgaataaatggcgaatcaagtacttagcaatccgaattattaaacttgtctaccactaataactgtcccgaatgaattggtcaatacttccacactgttacataagttaatcttaggtgaaataccgacttcataacttttacgcattatatgcttttcctggtaatgtttgtaacaactttgttgaatgattgtcaaattagatgattaaaaattaaataaatgttgttatcgtgacctggatcactgttcaggataaaacccgacaaactatatgtaggttaattgtaatgattttgtgaacagcctatactgccgccaggtctccggaacaccctgcaatcccgagccacccagcgttgtaacgtgtcgttttcgcatctggaagcagtgttttgcatgacgcgcagttatagaaaggacgctgtctgacccgcaagcagaccggaggaaggaaatcccgacgtctccaggtaacagaaagttaacctctgtgcccgtagtccccagggaataataagaacagcatgtgggcgttattcatgataagaaatgtgaaaaaacaaagacctgttaatctggacctacagaccatccggttccccatcacggcgatagcgtccattctccatcgcgtttccggtgtgatcacctttgttgcagtgggcatcctgctgtggcttctgggtaccagcctctcttcccctgaaggtttcgagcaagcttccgcgattatgggcagcttcttcgtcaaatttatcatgtggggcatccttaccgctctggcgtatcacgtcgtcgtaggtattcgccacatgatgatggattttggctatctggaagaaacattcgaagcgggtaaacgctccgccaaaatctcctttgttattactgtcgtgcttagtcttctcgcaggagtcctcgtatggtaagcaacgcctccgcattaggacgcaatggcgtacatgatttcatcctcgttcgcgctaccgctatcgtcctgacgctctacatcatttatatggtcggttttttcgctaccagtggcgagctgacatatgaagtctggatcggtttcttcgcctctgcgttcaccaaagtgttcaccctgctggcgctgttttctatcttgatccatgcctggatcggcatgtggcaggtgttgaccgactacgttaaaccgctggctttgcgcctgatgctgcaactggtgattgtcgttgcactggtggtttacgtgatttatggattcgttgtggtgtggggtgtgtgatgaaattgccagtcagagaatttgatgcagttgtgattggtgccggtggcgcaggtatgcgcgcggcgctgcaaatttcccagagcggccagacctgtgcgctgctctctaaagtcttcccgacccgttcccataccgtttctgcgcaaggcggcattaccgttgcgctgggtaatacccatgaagataactgggaatggcatatgtacgacaccgtgaaagggagcgactatatcggtgaccaggacgcgattgaatatatgtgtaaaaccgggccggaagcgattctggaactcgaacacatgggcctgccgttcagccgtctcgatgatggtcgtatctatcaacgtccgtttggcggtcagagcaaaaacttcggcggcgagcaggcggcacgcactgcggcagcagctgaccgtaccggtcacgcactgttgcacacgctttatcagcagaacctgaaaaaccacaccaccattttctccgagtggtatgcgctggatctggtgaaaaaccaggatggcgcggtggtgggttgtaccgcactgtgcatcgaaaccggtgaagtggtttatttcaaagcccgcgctaccgtgctggcgactggcggagcagggcgtatttatcagtccaccaccaacgcccacattaacaccggcgacggtgtcggcatggctatccgtgccggcgtaccggtgcaggatatggaaatgtggcagttccacccgaccggcattgccggtgcgggcgtactggtcaccgaaggttgccgtggtgaaggcggttatctgctgaacaaacatggcgaacgttttatggagcgttatgcgccgaacgccaaagacctggcgggccgtgacgtggttgcgcgttccatcatgatcgaaatccgtgaaggtcgcggctgtgatggtccgtgggggccacacgcgaaactgaaactcgatcacctgggtaaagaagttctcgaatcccgtctgccgggtatcctggagctttcccgtaccttcgctcacgtcgatccggtgaaagagccgattccggttatcccaacctgtcactacatgatgggcggtattccgaccaaagttaccggtcaggcactgactgtgaatgagaaaggcgaagatgtggttgttccgggactgtttgccgttggtgaaatcgcttgtgtaagcgtacacggcgctaaccgtctgggcggcaacagcctgctggacctggtggtctttggtcgcgcggcaggtctgcatctgcaagagtctatcgccgagcagggcgcactgcgcgatgccagcgagtctgatgttgaagcgtctctggatcgcctgaaccgctggaacaataatcgtaacggtgaagatccggtggcgatccgtaaagcgctgcaagaatgtatgcagcataacttcagcgtcttccgtgaaggtgatgcgatggcgaaagggcttgagcagttgaaagtgatccgcgagcgtctgaaaaatgcccgtctggatgacacttccagcgagttcaacacccagcgcgttgagtgcctggaactggataacctgatggaaacggcgtatgcaacggctgtttctgccaacttccgtaccgaaagccgtggcgcgcatagccgcttcgacttcccggatcgtgatgatgaaaactggctgtgccactccctgtatctgccagagagcgaatccatgacgcgccgaagcgtcaacatggaaccgaaactgcgcccggcattcccgccgaagattcgtacttactaatgcggagacaggaaaatgagactcgagtttagtatttatcgctataacccggatgttgatgatgctccgcgtatgcaggattacaccctggaagcggatgaaggtcgcgacatgatgctgctggatgcgcttatccagctaaaagagaaagatcccagcctgagcttccgccgctcctgccgtgaaggtgtgtgcggttccgacggtctgaacatgaacggcaagaatggtctggcctgtattaccccgattagcgcactcaaccagccgggcaagaagattgtgattcgcccgctgccaggtttaccggtgatccgcgatttggtggtagacatgggacaattctatgcgcaatatgagaaaattaagccttacctgttgaataatggacaaaatccgccagctcgcgagcatttacagatgccagagcagcgcgaaaaactcgacgggctgtatgaatgtattctctgcgcatgttgtagtacctcttgtccgtctttctggtggaatcccgataagtttatcggcccggcaggcttgttagcggcatatcgtttcctgattgatagccgtgataccgagactgacagccgcctcgacggtttgagtgatgcattcagcgtattccgctgtcacagcatcatgaactgcgtcagtgtatgtccgaaggggctgaacccgacgcgcgccatcggccatatcaagagcatgttgttgcaacgtaatgcgtaaaccgtaggcctgataagacgcgcaagcgtcgcatcaggcaaccagtgccggatgcggcgtgaacgccttatccggcctacaagtcattacccgtaggcctgataagcgcagcgcatcaggcgtaacaaagaaatgcaggaaatctttaaaaactgcccctgacactaagacagtttttaaaggttccttcgcgagccactacgtagacaagagctcgcaagtgaaccccggcacgcacatcactgtgcgtggtagtatccacggcgaagtaagcataaaaaagatgcttaagggatcacgatgcagaacagcgctttgaaagcctggttggactcttcttacctctctggcgcaaaccagagctggatagaacagctctatgaagacttcttaaccgatcctgacagcgttgacgctaactggcgtagcacgttccagcagttacctggtacgggagtcaaaccggatcaattccactctcaaacgcgtgaatatttccgccgcctggcgaaagacgctagtcgttactctagtacgatctccgaccctgacaccaatgtgaagcaggttaaagtcctgcagctcattaacgcataccgcttccgtggtcaccagcatgcgaatctcgatccgctgggactgtggcagcaagataaagtggccgatctggatccgtctttccacgatctgaccgaagcagacttccaggagaccttcaacgtcggtagttttgccagcggcaaagaaaccatgaaactcggcgagctgctggaagccctcaagcaaacctactgcggcccgattggtgccgagtatatgcacattaccagcaccgaagaaaaacgctggatccaacagcgtatcgagtctggtcgcgcgactttcaatagcgaagagaaaaaacgcttcttaagcgaactgaccgccgctgaaggtcttgaacgttacctcggcgcaaaattccctggcgcaaaacgcttcagcctggaaggcggtgacgcgttaatcccgatgcttaaagagatgatccgccacgctggcaacagcggcacccgcgaagtggttctcgggatggcgcaccgtggtcgtctgaacgtgctggtgaacgtgctgggtaaaaaaccgcaagacttgttcgacgagttcgccggtaaacataaagaacacctcggcacgggtgacgtgaaataccacatgggcttcagctctgacttccagaccgatggcggcctggtgcacctggcgctggcgtttaacccgtctcaccttgagattgtaagcccggtagttatcggttctgttcgtgcccgtctggacagacttgatgagccgagcagcaacaaagtgctgccaatcaccatccacggtgacgccgcagtgaccgggcagggcgtggttcaggaaaccctgaacatgagcaaagcgcgtggttatgaagttggcggtacggtacgtatcgttatcaacaaccaggttggtttcaccacctctaatccgctggatgcccgttctacgccgtactgtactgatatcggtaagatggttcaggccccgattttccacgttaacgcggacgatccggaagccgttgcctttgtgacccgtctggcgctcgatttccgtaacacctttaaacgtgatgtcttcatcgacctggtgtgctaccgccgtcacggccacaacgaagccgacgagccgagcgcaacccagccgctgatgtatcagaaaatcaaaaaacatccgacaccgcgcaaaatctacgctgacaagctggagcaggaaaaagtggcgacgctggaagatgccaccgagatggttaacctgtaccgcgatgcgctggatgctggcgattgcgtagtggcagagtggcgtccgatgaacatgcactctttcacctggagcccgtacctcaaccacgaatgggacgaagagtacccgaacaaagttgagatgaagcgcctgcaggagctggcgaaacgcatcagcacggtgccggaagcagttgaaatgcagtctcgcgttgccaagatttatggcgatcgccaggcgatggctgccggtgagaaactgttcgactggggcggtgcggaaaacctcgcttacgccacgctggttgatgaaggcattccggttcgcctgagcggtgaagactccggtcgcggtaccttcttccaccgccacgcggtgatccacaaccagtctaacggttccacttacacgccgctgcaacatatccataacgggcagggcgcgttccgtgtctgggactccgtactgtctgaagaagcagtgctggcgtttgaatatggttatgccaccgcagaaccacgcactctgaccatctgggaagcgcagttcggtgacttcgccaacggtgcgcaggtggttatcgaccagttcatctcctctggcgaacagaaatggggccggatgtgtggtctggtgatgttgctgccgcacggttacgaagggcaggggccggagcactcctccgcgcgtctggaacgttatctgcaactttgtgctgagcaaaacatgcaggtttgcgtaccgtctaccccggcacaggtttaccacatgctgcgtcgtcaggcgctgcgcgggatgcgtcgtccgctggtcgtgatgagcccgaaatccctgctgcgtcatccgctggcggtttccagcctcgaagaactggcgaacggcaccttcctgccagccatcggtgaaatcgacgagcttgatccgaagggcgtgaagcgcgtagtgatgtgttctggtaaggtttattacgacctgctggaacagcgtcgtaagaacaatcaacacgatgtcgccattgtgcgtatcgagcaactctacccgttcccgcataaagcgatgcaggaagtgttgcagcagtttgctcacgtcaaggattttgtctggtgccaggaagagccgctcaaccagggcgcatggtactgcagccagcatcatttccgtgaagtgattccgtttggggcttctctgcgttatgcaggccgcccggcctccgcctctccggcggtagggtatatgtccgttcaccagaaacagcaacaagatctggttaatgacgcgctgaacgtcgaataaataaaggatacacaatgagtagcgtagatattctggtccctgacctgcctgaatccgtagccgatgccaccgtcgcaacctggcataaaaaacccggcgacgcagtcgtacgtgatgaagtgctggtagaaatcgaaactgacaaagtggtactggaagtaccggcaagtgcagacggcattctggatgcggttctggaagatgaaggtacaacggtaacgtctcgtcagatccttggtcgcctgcgtgaaggcaacagcgccggtaaagaaaccagcgccaaatctgaagagaaagcgtccactccggcgcaacgccagcaggcgtctctggaagagcaaaacaacgatgcgttaagcccggcgatccgtcgcctgctggctgaacacaatctcgacgccagcgccattaaaggcaccggtgtgggtggtcgtctgactcgtgaagatgtggaaaaacatctggcgaaagccccggcgaaagagtctgctccggcagcggctgctccggcggcgcaaccggctctggctgcacgtagtgaaaaacgtgtcccgatgactcgcctgcgtaagcgtgtggcagagcgtctgctggaagcgaaaaactccaccgccatgctgaccacgttcaacgaagtcaacatgaagccgattatggatctgcgtaagcagtacggtgaagcgtttgaaaaacgccacggcatccgtctgggctttatgtccttctacgtgaaagcggtggttgaagccctgaaacgttacccggaagtgaacgcttctatcgacggcgatgacgtggtttaccacaactatttcgacgtcagcatggcggtttctacgccgcgcggcctggtgacgccggttctgcgtgatgtcgataccctcggcatggcagacatcgagaagaaaatcaaagagctggcagtcaaaggccgtgacggcaagctgaccgttgaagatctgaccggtggtaacttcaccatcaccaacggtggtgtgttcggttccctgatgtctacgccgatcatcaacccgccgcagagcgcaattctgggtatgcacgctatcaaagatcgtccgatggcggtgaatggtcaggttgagatcctgccgatgatgtacctggcgctgtcctacgatcaccgtctgatcgatggtcgcgaatccgtgggcttcctggtaacgatcaaagagttgctggaagatccgacgcgtctgctgctggacgtgtaatagtttaagtttcacctgcactgtagaccggataaggcattatcgccttctccggcaattgaagcctgatgcgacgctgacgcgtcttatcaggcctacgggaccaccaatgtaggtcggataaggcgcaagcgccgcatccgacaagcgatgcctgatgtgacgtttaacgtgtcttatcaggcctacgggtgaccgacaatgcccggaagcgatacgaaatattcggtctacggtttaaaagataacgattactgaaggatggacagaacacatgaacttacatgaatatcaggcaaaacaactttttgcccgctatggcttaccagcaccggtgggttatgcctgtactactccgcgcgaagcagaagaagccgctagtaaaatcggtgccggtccgtgggtagtgaaatgtcaggttcacgctggtggccgcggtaaagcgggcggtgtgaaagttgtaaacagcaaagaagacatccgtgcttttgcagaaaactggctgggcaagcgtctggtaacgtatcaaacagatgccaatggccaaccggttaaccagattctggttgaagcagcgaccgatatcgctaaagagctgtatctcggtgccgttgttgaccgtagttcccgtcgtgtggtctttatggcctccaccgaaggcggcgtggaaatcgaaaaagtggcggaagaaactccgcacctgatccataaagttgcgcttgatccgctgactggcccgatgccgtatcagggacgcgagctggcgttcaaactgggtctggaaggtaaactggttcagcagttcaccaaaatcttcatgggcctggcgaccattttcctggagcgcgacctggcgttgatcgaaatcaacccgctggtcatcaccaaacagggcgatctgatttgcctcgacggcaaactgggcgctgacggcaacgcactgttccgccagcctgatctgcgcgaaatgcgtgaccagagccaggaagatccgcgtgaagcacaggctgcacagtgggaactgaactacgttgcgctggacggtaacatcggttgtatggttaacggcgcaggtctggcgatgggtacgatggacatcgttaaactgcacggcggcgaaccggctaacttccttgacgttggcggcggcgcaaccaaagaacgtgtaaccgaagcgttcaaaatcatcctctctgacgacaaagtgaaagccgttctggttaacatcttcggcggtatcgttcgttgcgacctgatcgctgacggtatcatcggcgcggtagcagaagtgggtgttaacgtaccggtcgtggtacgtctggaaggtaacaacgccgaactcggcgcgaagaaactggctgacagcggcctgaatattattgcagcaaaaggtctgacggatgcagctcagcaggttgttgccgcagtggaggggaaataatgtccattttaatcgataaaaacaccaaggttatctgccagggctttaccggtagccaggggactttccacagtgaacaggccattgcatacggcactaaaatggttggcggcgtaaccccaggtaaaggcggcaccacccacctcggcctgccggtgttcaacaccgtgcgtgaagccgttgctgccactggcgctaccgcttctgttatctacgtaccagcaccgttctgcaaagactccattctggaagccatcgacgcaggcatcaaactgattatcaccatcactgaaggcatcccgacgctggatatgctgaccgtgaaagtgaagctggatgaagcaggcgttcgtatgatcggcccgaactgcccaggcgttatcactccgggtgaatgcaaaatcggtatccagcctggtcacattcacaaaccgggtaaagtgggtatcgtttcccgttccggtacactgacctatgaagcggttaaacagaccacggattacggtttcggtcagagcacctgtgtcggtatcggcggtgacccgatcccgggctctaactttatcgacattctcgaaatgttcgaaaaagatccgcagaccgaagcgatcgtgatgatcggtgagatcggcggtagcgctgaagaagaagcagctgcgtacatcaaagagcacgttaccaagccagttgtgggttacatcgctggtgtgactgcgccgaaaggcaaacgtatgggccacgcgggtgccatcattgccggtgggaaagggactgcggatgagaaattcgctgctctggaagccgcaggcgtgaaaaccgttcgcagcctggcggatatcggtgaagcactgaaaactgttctgaaataaatatctgtaataagaaatagccctcgccgcttccctctacaggaatggcgaagggctgtcggtttcgacatggttggccatcgtatgatggccttttttgtgcttatcggctactttttcgctgcgctatcagggtaaatttatagtcatcggtattaaaagcgttgcggctatattcaaacacccgaccatcaactaaatatccacggcttactttttcaagaatcggctttgtctggctgatattaagcagacggctcatctcttcggttggcatcagaggaatgatttcctgttcgctacgatcgataaccattttcttcacttcttcgataaagtgatatttgctattttccatgacctgccaggtgagatccgggaacaacgcaagcggcatccaggtttcttccagcgccattggcttttgcttgcgatagcgcacgcgcttcacatgccacacacgatcctgcggggtgatttgtagctgttgctgaagaaaatcgtcagccggaatcacttcgaatatcagaacttcactgtgtgtatcgacgtgacggtcgctcagtttttcatcaaaactggttaactgaaaaatatcgtaattgacccgctcttctttgacgtaagtcccgctgccctgaatgctttcgaggatctgctgctcgactagctggcgcaaagcctgacgcaccgtaacccggctgacgccaaactctgtttgtagcgcactttcagtgggtaacgcatcgccaggtttaagctcgccacgcgcaatttgttcacgaatgcgatcggcaatctgccggtataagggcttgtgtcccatttttagtatctcattaatacgaatttaaccattatgcccgataaattcatcctgtaaataatacaaatacaatacaaataatttcaatcaagtgaaattgatcacataatggtattgttttatcgggcacactggcgcgactataaaaacgatcaagtgaggatcatgatgaatctgacgactctgacccaccgcgatgcgttgtgtctgaatgcgcgctttaccagccgtgaagaggccatccacgcgttgactcaacgtcttgctgctctggggaaaatttccagtactgagcaatttctggaagaagtgtatcgccgtgaaagccttggcccgaccgccttaggtgaagggttggctgtgccgcatggcaaaactgctgcggtaaaagaagcggcgtttgcggtcgccacactcagcgagccgcttcagtgggaaggcgttgatggcccggaagcagttgatttagtggtgctgctggcgattccccccaatgaagcgggtactacgcatatgcaactgctgacagcgctgaccacgcgccttgcggatgatgagattcgggcgcgtatacagagcgcgacgacgcctgatgagttgctcagcgcgctggatgacaagggaggcacgcaaccttctgcctctttttccaacgcgccaactatcgtctgcgtaacggcctgtccggcgggtattgctcacacctatatggctgcggaatatctggaaaaagccggacgcaaactcggcgtaaatgtttacgttgaaaaacaaggcgctaacggcattgaagggcgtttaacggcggatcaactcaatagtgcaaccgcctgtatttttgcggctgaagtcgccatcaaggagagtgagcgttttaatggcattcccgcgcttagtgtgcctgttgccgagccgattcgccatgcagaagcgttgatccaacaagcgcttaccctcaagcgtagcgatgagacgcgtaccgtacagcaagatacgcaaccggtgaaaagtgtcaaaacggagctgaaacaggcactgttgagcggaatctcttttgccgtaccgttgattgtcgcggggggcacggtgctggcggtcgcggtattactgagccaaatcttcgggctacaagatctgtttaatgaagaaaactcctggctgtggatgtaccgcaagctgggcggcgggctgctcggaattttgatggtaccggtgctcgcggcctataccgcctattctctggcagataaaccggcgttagcgccaggctttgcggctggacttgccgccaacatgatcggctccgggtttctcggcgcggtcgttggcggattgatagccggttacttgatgcgctgggtgaaaaatcacttgcgtcttagcagtaaattcaatggattcctgactttttatctctacccggtgctcggtacgttgggagcgggcagtctgatgctgtttgtggtgggggaacctgtcgcctggatcaataacagccttaccgcctggctgaacggtctgagtggaagtaacgcgctgttgctgggtgccattctcggttttatgtgttcctttgaccttggagggccagtgaataaagccgcttatgcattctgcctgggcgcaatggcgaacggcgtttacggcccgtatgccattttcgcctccgtcaaaatggttagcgcatttaccgtaaccgcttccacgatgctcgcaccgcgcctgtttaaagagtttgaaattgagaccgggaaatccacctggctgttagggctggcaggtattaccgaaggggcgatcccgatggcgattgaagatccgctgcgggttattggtagctttgtgctgggctctatggtaacgggcgctattgtcggtgcgatgaatatcggccttagcacacccggtgccggcattttcagcctctttttacttcatgataatggcgcgggcggtgttatggcggcaattggctggtttggcgcggcattggtgggggctgcaatcagcactgcaattctcctgatgtggcggcgtcacgcggttaagcatggcaactatctgactgatggcgtaatgccataaacaaaaaggaaacgacgatgaaagcagtatctcgcgttcacatcaccccgcatatgcactgggatcgagagtggtatttcaccaccgaagagagtcgtattctgctggtcaataatatggaagagatcctgtgccgactggaacaggacaacgaatacaaatattacgtactcgacgggcaaacggcgatcctcgaagattatttcgcggtgaaaccggaaaacaaagaccgtgtgaagaaacaggtagaagccggcaagttgattatcggcccctggtatacccagaccgataccacgattgtttctgcggaatccatcgtccgtaatctgatgtacggaatgcgtgactgcctcgcgtttggcgagccgatgaaaataggttatttaccagattcctttggcatgtccgggcaactgccgcatatctacaatggatttggcattacccgcaccatgttctggcgcggatgtagcgagcgccacggtactgataaaaccgagtttttgtggcaaagcagtgacggtagcgaagtgacggcgcaggtgctgccgctgggctacgccatcggtaagtacttacctgccgacgaaaacggattacgtaaacgcctcgacagttattttgacgtgctggaaaaagcgtctgtaaccaaagagattttgctgccgaatgggcatgaccagatgccattgcagcaaaatatcttcgaagtgatggataagctacgtgagatctaccctcaacgtaagtttgtgatgagccgctttgaagaggtatttgagaagatcgaagcgcagcgagataatctggcaaccctgaaaggggaatttattgatggcaaatatatgcgcgtgcatcgcaccatcggttctacgcgtatggatatcaaaattgcccacgcgcgtattgaaaataagattgttaatctgctggaaccgctggcaacactggcctggacgttgggttttgaataccaccacggcttgctggagaaaatgtggaaagagatcttaaaaaatcatgcccacgacagtatcggctgctgctgtagtgacaaagttcatcgcgaaatcgtcgcccgcttcgaactggctgaagacatggcggataatctgattcgtttctacatgcgcaaaattgccgacaacatgccgcagagcgacgccgacaaactcgtcctgtttaacctgatgccctggccgcgtgaagaagttatcaacaccactgtgcggctgcgcgccagccagtttaatttgcgggacgatcgcggtcagcctgtaccgtattttattcgccatgcccgtgagatcgatccaggcctaatcgatcggcaaatagttcattacggtaattacgatccctttatggagtttgatatacagatcaaccagattgtcccttctatgggctatcgcacgctttatatcgaagcgaatcagcctggcaacgtaattgcggcaaaaagtgacgctgaagggatactggaaaatgctttctggcaaattgcgctcaatgaggatggttctctgcaactggtagataaagacagcggtgtgcgctatgaccgggtattgcaaattgaagaaagctctgatgatggtgatgaatatgactatagtcccgcaaaagaagagtgggtaattaccgcagcgaacgcgaaaccgcaatgcgatattattcatgaagcctggcagagcagggctgttatccgctatgacatggcagtgccgctcaatttgagtgaacgcagcgcccggcaatccactggcagagtaggggtggtgttggttgtcactcttagtcataacagcaggcgtattgatgtggatatcaatcttgataaccaggctgacgatcatcgccttcgtgtcctggtccctacaccttttaacaccgacagtgttctggcagatacgcagtttggtagcctaacgcgccccgtgaacgacagtgcaatgaacaactggcagcaagaaggctggaaagaagcgccggttccggtatggaatatgctcaactatgttgccttacaggaagggcgtaacggcatggctgtctttagcgaagggttacgtgaatttgaagtcatcggtgaagagaagaaaacctttgccattacgttgctgcgtggcgtgggcttactgggcaaagaagatctgcttttaaggcctgggcggcctagcggaattaaaatgccagtcccggacagtcaactacgtggtctgctttcttgtcgcctaagtttattgagttataccggtacgccaaccgccgctggtgtagctcagcaggcgcgagcatggctgactccagtacagtgttacaacaaaatcccatgggatgtgatgaagctcaacaaagccggattcaacgtgccggaaagttatagtttgttgaaaatgcccccagtgggatgcctgataagcgcacttaagaaagctgaagaccgacaagaagtgattttacggctgtttaatccggctgaaagtgcaacctgtgatgcgactgttgctttcagtcgcgaggtgatttcttgcagtgaaacgatgatggatgaacacattaccaccgaggaaaatcaaggtagtaatctaagcgggccttttttacccggccagagtcggacgttcagttaccggcttgcctgaatagcaatcaaaccgaagccacatatgcgcggccagattgttgacaaagggcgctttgttcatgccggatacggcatgaacgctttattcggtctacaaaagcaggcaaattcaatatattgcagagatgatgtagacactggcaagcgtagcgcatcaggtaattttgcgtttatcttcactctcaagccacgtatatgtggctttatttttaacaaaataataaccctgggtgagttaattataatataattataagttaactaaatgttaatattggcggggtggatttatgcctttattagtaatcctgaaactctgcgtcgtattagccagtgaccaaaaaaagaattaaggtcaaccgtgctgtttttgcttcgtctctttttatctttaattgccaaccgaaactaatttcagccttataactcacacattttaaacataaatgtcactaaagttaccttattgaaacatgattaacataatttgtaggaattgatatttatcaatgtataagtcttggaaatgggcatcaaaaagagataaattgttctcgatcaaattggctgaaaggcggtaatttagctataaattgatcaccgtcgaaaaatgcaaatttgcttcaacaaaaacctgtttattgtaaggattttgcggcgtaatatatacgtgggatcaatttgagtttttattaacatgtttgcaacctttctttacgccgtttttgtgtgcattcacatggtatgatgaaagtgttcaaacaaatttctattggggcatgcgtgtgaccctttctaacggggttcactctcggagtcttcatgcgatgagcaaggagtcatgatgttagatatagtcgaactgagccgcttacagtttgccttgaccgcgatgtaccacttcctttttgtgccactgacgctcggtatggcgttcctgctggccattatggaaacggtctacgtcctctccggcaaacagatttataaagatatgaccaagttctggggcaagttgtttggtatcaacttcgctctgggtgtggctaccggtctgaccatggagttccagttcgggactaactggtcttactattcccactatgtaggggatatcttcggtgcgccgctggcaatcgaaggtctgatggccttcttcctcgaatccacctttgtaggtctgttcttcttcggttgggatcgtctgggtaaagttcagcatatgtgtgtcacctggctggtggcgctcggtagtaacctgtccgcactgtggattctggttgcgaacggctggatgcaaaacccaatcgcgtccgatttcaactttgaaactatgcgtatggagatggtgagcttctccgagctggtgcttaacccggttgctcaggtgaaattcgttcacactgtagcgtctggttatgtgactggcgcgatgttcatcctcggtatcagcgcatggtatatgctgaaaggtcgtgacttcgccttcgctaaacgctcctttgctatcgctgccagcttcggtatggctgctgttctgtctgttattgttctgggtgatgaatccggctacgaaatgggcgacgtgcagaaaaccaaactggctgctattgaagccgagtgggaaacgcaacctgcgcctgctgcctttactctgttcggcattcctgatcaggaagaggagacgaacaaatttgcgattcagatcccttacgcactgggcatcattgcaacgcgttccgtggataccccggttatcggcctgaaagagctgatggtgcagcatgaagaacgcattcgtaacgggatgaaggcgtactctctgctcgaacaactgcgttctggttctaccgaccaggcggttcgtgaccagttcaatagcatgaagaaagacctcggttacggtctgctgctgaaacgctatacgccaaacgtggctgatgcgactgaagcgcagattcaacaggcaaccaaagactccatcccgcgtgtagcgccgctgtactttgcgttccgtatcatggtggcgtgtggcttcctgcttctggcaatcatcgcgctctctttctggagtgtcatccgcaaccgcattggcgagaaaaaatggcttctgcgcgccgcgctgtacggtattccgctgccgtggattgctgtagaagcgggctggttcgtggctgaatatggccgccaaccgtgggctatcggtgaagtgctgccgacagctgtggcgaacagcagtctgaccgcaggcgatctcatcttcagtatggtgctgatttgcggcctgtataccctgttcctggtggcagaattgttcttaatgttcaagtttgcacgcctcggcccaagcagcctgaaaaccggtcgctatcactttgagcagtcttccacgactactcagccggcacgctaagacaggagtcgtcaaatgatcgattatgaagtattgcgttttatctggtggctgctggttggcgttctgctgattggttttgcagtcactgacggtttcgacatgggggtgggcatgctcacccgtttcctcggtcgtaacgacaccgagcgtcgaattatgattaactccattgcaccacactgggacggtaaccaggtttggctgatcaccgcgggcggcgcactctttgctgcctggccgatggtctatgccgctgcgttctccggcttctatgtggcgatgatcctcgtgctggcgtctttgttcttccgtccggtcggttttgactaccgctccaagattgaagaaacccgctggcgtaacatgtgggactggggcatcttcattggtagcttcgttccgccgctggtaattggtgtagcgttcggtaacctgttgcagggcgtaccgttcaacgttgatgaatatctgcgtctgtactacaccggtaacttcttccagttgcttaacccgttcggcctgctggcaggcgtggtgagcgtagggatgatcattactcagggcgcaacctatctgcaaatgcgtaccgtgggcgaactgcacctgcgtacccgtgcaacggctcaggtggctgcgctggtgacactggtctgtttcgcactggctggcgtatgggtgatgtacggtatcgatggttatgtcgtgaaaagcacaatggaccattacgcagcctctaacccactgaataaagaagtggttcgtgaagctggcgcatggctggttaacttcaacaacacgccaattctgtgggctattccggcactgggtgtggttctgccgctgctgaccatcctgactgcacgtatggataaagccgcgtgggcgtttgtgttctcctccctgacgctggcctgcatcatcctgacagccggtatcgcaatgttcccgtttgtgatgccgtccagcaccatgatgaacgcaagtctgacaatgtgggatgcaacttccagccagctgacgcttaacgtcatgacctgggttgcggtggttctggtaccgatcattctgctctacaccgcctggtgttactggaaaatgttcggtcgtatcaccaaagaagatattgaacgtaacacccactctctgtactaagtaaggagctaaaaatgtggtatttcgcatggattctgggaacgcttcttgcctgtagctttggggtaatcaccgcgctggcgcttgaacacgtcgaaagtggcaaagccggtcaagaagacatctgatgagtaagattatcgcgactttgtatgcggtaatggacaagcgccccctgcgggcgctttccttcgtgatggcgcttctgttagcaggatgtatgttttgggacccatctcgttttgccgcgaagaccagtgaactggaaatctggcatggtttattgctgatgtgggccgtctgtgctggtgtgattcacggcgtgggctttcgtccgcagaaggttctttggcaagggattttttgcccattgcttgccgatattgttctcattgtcgggctgattttcttcttcttttaaatcagaattctctttaaaaaattatgggccgctccaggcccataaatttttacgctcccttaacttgccctcattcccaaacctcaatcgcgcgcgtatagtagcagcgtttaaaagctctaacttttgttgcattaccgggatgtaaagtgaatacaacgctgtttcgatggccggttcgcgtctactatgaagataccgatgccggtggtgtggtgtaccacgccagttacgtcgctttttatgaaagagcacgcacagagatgctgcgtcatcatcacttcagtcagcaggcgctgatggctgaacgcgttgcctttgtggtacgtaaaatgacggtggaatattacgcacctgcgcggctcgacgatatgctcgaaatacagactgaaataacaagtatgcgtggcacctctttggttttcacgcaacgtattgtcaacgccgagaatactttgctgaatgaagcagaggttctggttgtttgcgttgacccactcaaaatgaagcctcgtgcgcttcccaagtctattgtcgcggagtttaagcagtgactgacatgaatatccttgatttgttcctgaaggctagccttctggttaaacttatcatgttgattttgattggttttagtatcgcatcttgggccattattatccagcggacccgtattcttaacgcagcggcgcgcgaagccgaagcgtttgaagataaattctggtctggaatcgaactctctcgcctctatcaagagagccaggggaaacgggataatctgactggtagcgaacaaatcttttacagcgggttcaaagagtttgtgcgcctgcatcgtgccaatagccatgcgccggaagccgtagtggaaggggcgagccgtgctatgcgtatctccatgaaccgtgaacttgaaaatctggaaacgcacattccgttcctcggtacggttggctccatcagcccgtatattggtctgtttggtacggtctgggggatcatgcacgcctttatcgccctcggggcggtaaaacaagcaacactgcaaatggttgcgcccggtatcgcagaagcgttgattgcgactgcaattggtctgtttgccgctatcccggcagttatggcctacaaccgcctcaaccagcgcgtaaacaaactggaactgaattacgacaactttatggaagagtttaccgcgattctgcaccgccaggcgtttaccgttagcgagagcaacaaggggtaagccatggccagagcgcgtggacgaggtcgtcgcgatctcaagtccgaaatcaacattgtaccgttgctggacgtactgctggtgctgttgctgatctttatggcgacagcgcccatcatcacccagagcgtggaggtcgatctgccagacgctactgaaagtcaggcggtgagcagtaacgataatccgccagtgattgttgaagtgtctggtattggtcagtacaccgtggtggttgagaaagatcgcctggagcgtttaccaccagagcaggtggtggcggaagtgtccagccgtttcaaggccaacccgaaaacggtctttctgatcggtggcgcaaaagatgtgccttacgatgaaataattaaagcactgaacttgttacatagtgcgggtgtgaaaagcgttggtttaatgacgcagcctatctaaacatctgcgtttcccttgcttgaaagagagcgggtaacaggcgaacagtttttggaaaccgagagtgagtaaggcaaccgaacaaaacgacaagctcaagcgggcgataattattagtgcagtgctgcatgtcatcttatttgcggcgctgatctggagtagcttcgatgagaatatagaagctagtgccggaggcggcggtggtagctccatcgacgctgtcatggttgatagtggtgcggtagttgagcagtacaaacgcatgcaaagccaggaaagtagcgcgaagcgttctgatgaacagcgcaagatgaaggaacagcaggctgctgaagaactgcgtgagaaacaagcggctgaacaggaacgcctgaagcaacttgagaaagagcggttagcggctcaggagcagaaaaagcaggctgaagaagccgcaaaacaggccgagttaaagcagaagcaagctgaagaggcggcagcgaaagcggcggcagatgctaaagcgaaggccgaagcagatgctaaagctgcggaagaagcagcgaagaaagcggctgcagacgcaaagaaaaaagcagaagcagaagccgccaaagccgcagccgaagcgcagaaaaaagccgaggcagccgctgcggcactgaagaagaaagcggaagcggcagaagcagctgcagctgaagcaagaaagaaagcggcaactgaagctgctgaaaaagccaaagcagaagctgagaagaaagcggctgctgaaaaggctgcagctgataagaaagcggcagcagagaaagctgcagccgacaaaaaagcagcagaaaaagcggctgctgaaaaggcagcagctgataagaaagcagcggcagaaaaagccgccgcagacaaaaaagcggcagcggcaaaagctgcagctgaaaaagccgctgcagcaaaagcggccgcagaggcagatgatattttcggtgagctaagctctggtaagaatgcaccgaaaacggggggaggggcgaaagggaacaatgctagccctgccgggagtggtaatactaaaaacaatggcgcaagtggggccgatatcaataactatgccgggcagattaaatctgctatcgaaagtaagttctatgacgcaagctcctatgcaggcaaaacctgtacgctgcgcataaaactggcacccgatggtatgttactggatatcaaacctgaaggtggcgatcccgcactttgtcaggctgcgttggcagcagctaaacttgcgaagatcccgaaaccaccaagccaggcagtatatgaagtgttcaaaaacgcgccattggacttcaaaccgtaatcgcgatgttgactgttcggacggtcaacatcaggcaccggttgccacggggttctggtagttttgtgtattttagtttgttaacattctgctaaattatcgtgggccatcggtccagataagggagatatgatgaagcaggcattacgagtagcatttggttttctcatactgtgggcaagtgttctgcatgctgaagtccgcattgtgatcgacagcggtgtagattccggtcgtcctattggtgttgttcctttccagtgggcggggcctggtgcggcacctgaagatattggcggcatcgttgctgctgacttgcgtaacagcggtaaatttaatccgttagatcgcgctcgtctgccacagcagccgggtagtgcgcaggaagtacaaccagctgcatggtccgcactgggcattgacgctgtagttgtcggtcaggtcactccgaatccggatggttcttacaatgttgcttatcaacttgttgacactggcggcgcaccgggtactgtacttgctcagaacagctacaaagtgaacaagcagtggctgcgttatgctggtcataccgccagtgatgaagtgtttgaaaaactgaccggcattaaaggtgcgttccgtactcgtattgcctacgttgttcagaccaacggcggtcagttcccgtatgaactgcgcgtatctgactatgacggttacaaccagtttgtcgttcaccgtagtccgcagccgctgatgtctccggcgtggagtccagacggttctaaactggcttatgtgaccttcgaaagcggtcgttccgcgctggttattcagacgctggcaaatggcgctgtacgtcaggtggctagtttcccgcgtcacaacggtgcacctgcattcagcccagacggcagcaaactggcattcgccttgagcaaaaccggtagtctgaacctgtacgtaatggatttggcttctggtcagatccgccaggtgactgatggtcgcagtaacaataccgaaccgacctggttcccggatagccagaacctggcatttacttctgaccaggccggtcgtccgcaggtttataaagtgaatatcaacggcggtgcgccacaacgtattacctgggaaggtagccagaaccaggatgcggatgtcagcagcgacggtaaatttatggtaatggtcagctccaatggtgggcagcagcacattgccaaacaagatctggcaacgggaggcgtacaagttctgagctccacgttcctggatgaaacgccaagtctggcacctaacggcactatggtaatctacagctcttctcaggggatgggatccgtgctgaatttggtttctacagatgggcgtttcaaagcgcgtcttccggcaactgatggacaggtcaaattccctgcctggagcccgtatctgtgataataattaattgaatagtaaaggaatcattgaaatgcaactgaacaaagtgctgaaagggctgatgattgctctgcctgttatggcaattgcggcatgttcttccaacaagaacgccagcaatgacggcagcgaaggcatgctgggtgccggcactggtatggatgcgaacggcggcaacggcaacatgtcttccgaagagcaggctcgtctgcaaatgcaacagctgcagcagaacaacatcgtttacttcgatctggacaagtacgatatccgttctgacttcgctcaaatgctggatgcacatgcaaacttcctgcgtagcaacccgtcttacaaagtcaccgtagaaggtcacgcggacgaacgtggtactccggaatacaacatctccctgggtgaacgtcgtgcgaacgccgttaagatgtacctgcagggtaaaggcgtttctgcagaccagatctccatcgtttcttacggtaaagaaaaacctgcagtactgggtcatgacgaagcggcatactccaaaaaccgtcgtgcggtactggtttactaagagaattgcatgagcagtaacttcagacatcaactattgagtctgagcttactggttggtatagcggccccctgggccgcttttgctcaggcaccaatcagtagtgtcggcagtggcagcgtcgaagaccgcgtcactcaacttgagcgtatttctaatgctcacagccagcttttaacccaactccagcaacaactttctgataatcaatccgatattgattccctgcgtggtcagattcaggaaaatcagtatcaactgaatcaggtcgtggagcggcaaaagcagatcctgttgcagatcgacagcctcagcagcggtggtgcagcggcgcaaagtaccagcggcgatcaaagcggtgcggcggcaagtacgacgccgacagctgatgctggtactgcgaatgctggcgcgccggtgaaaagcggtaatgcaaacacggattacaatgcagctattgcgctggtgcaggataaatcccgccaggatgacgcaatggtggcatttcagaatttcatcaaaaattaccctgatagtacttacctgccaaacgccaattattggctgggtcagttaaactacaacaagggtaaaaaagatgatgcggcgtactattttgctagcgtagtgaaaaactatccgaagagtccaaaggctgcagatgcgatgtttaaagtcggcgtcatcatgcaggacaaaggtgacaccgcaaaagcgaaagccgtataccagcaggttatcagtaaataccctggtactgatggcgctaaacaggcacaaaaacgtctgaacgcgatgtaatgcataacacacgaccagaagtcgcattatttctggtcgtgtcgtgcgaatcataagcagttgagtgatctacatcgaaatttttgttgcgctcaagtctgaaatcagtaatatatgccgccgttgccacgggatatcaaacaaaccgaaagcaacgaaaaagtgggtcgttagctcagttggtagagcagttgacttttaatcaattggtcgcaggttcgaatcctgcacgacccaccaatcgctaaggtggaagcggtagtaaaacgtgaaggataacgttgcatgagcaacggcccgaagggcgagacgaagtcgagtcatcctgcacgacccaccactaacatagttagttgtagtatccagcgtagtatcgggtgattagctcagctgggagagcacctcccttacaaggagggggtcggcggttcgatcccgtcatcacccaccaccgggtcgttagctcagttggtagagcagttgacttttaatcaattggtcgcaggttcgaatcctgcacgacccaccagttttaacatcgaagacagatgttaagcgtgtaggataacgttgcgtcagcaacggcccgtagggcgagcgaagcgagtcatcctgcacgacccaccactaatgacggtgggttcggtggaagtagtttgtagtatccagcgcagtatcgggtgattagctcagctgggagagcacctcccttacaaggagggggtcggcggttcgatcccgtcatcacccaccactcgggtcgttagctcagttggtagagcagttgacttttaatcaattggtcgcaggttcgaatcctgcacgacccaccagttttaacatcaaactcagatgttaagcgtgaaggataacgttgcgccagcaacggcccgtagggcgagcgaagcgagtcatcctgcacgacccaccaatcttaaagattggccccgagtaaaaatctttcaggtaacacccgtatgggtcgttagctcagttggtagagcagttgacttttaatcaattggtcgcaggttcgaatcctgcacgacccaccaatttaaaggtggttactggtagagaacgtgaaggataacgttgcgttagcaacggcccgaagggcgagacgaagtcgagtcatcctgcacgacccaccatcctgaatgattaaggcagcataatcccgcaaggggtcgttagctcagttggtagagcagttgacttttaatcaattggtcgcaggttcgaatcctgcacgacccaccaatgtaaaaaagcgccctaaaggcgcttttttgctatctgcgatactcaaagattcgaacctgcagcaggtttgagttgagcgcagcgaaacaacggagccgctcgcggcgacggcccgaagggcgagcgaagcgagtcatcctgcacgacccaccaatgtaaaaaagcgccctaaaggcgcttttttgctattcaggcatcctcaatttcactttgtaaacctgatgacatcgtcagagcttactgtgcaagcaactctatgtcggtggaattaggcgtaaaatgacgcatcctgcacattaggcgtaattcgagtgacttttccccaccattcgactatcttgtttagcatataaaacaaattacaccgataacagcgaatattacgctaatgtcggttttaacgttaagcctgtaaaacgagatggtaagatgagcgtaatgtttgatccagacacggcgatttatcctttccccccgaagccgacgccgttaagcattgatgaaaaagcgtattaccgcgagaagataaaacgtctgctaaaagaacgtaatgcggtgatggttgcccactactataccgatcccgaaattcaacaactggcagaagaaaccggtggctgtatttctgattctctggaaatggcgcgcttcggtgcaaagcatcccgcttctactttgttagtcgctggggtgagatttatgggagaaaccgccaaaattctcagtccggaaaaaacaattctgatgccgacacttcaggctgaatgtagtctggatctcggctgccctgttgaagaatttaacgcattttgcgatgcccatcccgatcgtactgtcgtcgtctacgccaacacttctgctgcggtaaaagcgcgcgcagattgggtggtaactagtagcattgccgtcgaacttattgatcatcttgatagtttgggtgaaaaaatcatctgggcacccgacaaacatctggggcgttacgtgcaaaaacagacgggtggagacattctatgctggcagggtgcctgtattgtgcatgatgaatttaagactcaggcgttaacccgcttgcaagaagaatacccggatgctgccatactggtgcatccagaaagtccacaagctattgtcgatatggcggatgcggtcggttccaccagtcaactgatcgctgctgcgaaaacattgccacatcagaggcttattgtggcaaccgatcggggtattttctacaaaatgcagcaggcggtgccagataaagagttactggaagcaccaaccgcaggtgagggtgcaacctgccgcagctgcgcgcattgtccgtggatggccatgaatggccttcaggccatcgcagaggcattagaacaggaaggaagcaatcacgaggttcatgttgatgaaaggctgcgagagagggcgctggtgccgctcaatcgtatgctggattttgcggctacactacgtggataacgaataataaggcgtaacgttacgctttgggggaaagatggatttttttagtgtgcagaatatcctggtacatataccaataggggcaggcggttatgatctcagttggatcgaagcggtaggcacgatcgccgggttgctgtgtattggccttgccagtctggagaagatcagcaactacttctttggcctgatcaacgtcaccttgtttggcattattttctttcagattcagctgtatgccagcctgctattacaggtgtttttctttgccgcgaatatttacggttggtatgcgtggagccgacaaaccagtcagaacgaggcggagttgaaaattcgctggttgccattgccgaaggcactcagctggttggcggtttgcgttgttagcattggtctgatgacggtatttatcaatccggtgtttgcatttttgacccgcgtggcagtcatgatcatgcaagcattaggattacaggttgtgatgcctgaactgcaaccggacgctttcccgttctgggatagttgcatgatggtgttatctatcgtggcaatgattctgatgacgcgtaagtatgtggaaaactggctgttgtgggtgattattaacgtgattagcgtcgttatttttgcacttcagggcgtttacgccatgtctctggagtacatcatcctgacctttattgcgctcaacggcagccggatgtggatcaacagcgcacgtgaaagaggcagtcgcgcgctgtcccattaatggtgatgatgactatggccagacaccccttcattcaggtggcagtctggcccatgacaaggttgatattccatctgaatggtggcgtgctcaatctgatagtgatccatcaggtagtgttggatctgatccaacaaggcatcgtgatcgtgtggcgggatcacctgcacatgcaacgtcatcaccggcttctcgcctaccatccatacatgtacatggtgcacattgcggacttccgggatttcccggcacatacgacgcttcagttcagcgatatccaggcttaccggtgcaccttcaagtaattcattcacgctatctttcaacagtcgccacgcgctacgcagaaccagaaggctcaccagtatgctgagaatggggtcagcaggtgtccagccagtccagataataatcaacgcggcaataatagccccaacgctacccagcaggtccccgagcacatgcagtgccgctgctcgtacgttgaggtttttctcttcgctgccgtgatgaagtaaccagaaagaaagtatatttgccagcaacccagccacggcaattgccatcatcatgccgccctcgaccggacgcggcgtgcggaagcgttctatcgcctcccagacaatcaaaatggtaattaccacgagggctatggcattcacaaacgccgcgagcgtggtcagtcttagccaaccgaaagtgtggcgaatggtgggaggacgacgactaaattgcacggcgagtagggcgaaaagcagggcggcagtatcggtcaacatatgacccgcatcggccagcaatgccagagaaccagaaagaaaaccaccaacgacttctaccagcataaacccggcagtcacgccgaaagcatacaacaagcgacgagcattattatcttctggcaggtgactggacgtgtgactgtgactgtgcgccatgacgagtcatcccttaattattctcacttaactttatgacatcatactgcttttagaagtgaaaaattaaaagggagagactccgctctcccattattggctattttgcagggttactgcgtggtaccgtcggttttggtatcgacatcattattgatgccatcaccggtttgtacctttttattgatatccggacagcgaccatctttgcacatggtgttcttgtgctcttcatctttggtcattccgtcattgttcatactagaaccatcgctatgcagcattgtgccgccagaaccggtatttaccccgttattgtcgacgttatttggcgcgacattttcacgggcgtcaggggctacctggcccgcatcagctgcggcgtttgcctggccgttattagtttgcgctccgctatcggcagccagtgcggcaccgctggcaaggcttagagtggcagtcagaaataatgtggccagttttgtcattttcataggatgctcctgttatggtcgttatgtcggataacctcttccaacagtgcatttgcaggtgaatataaggcattggtttaagatttcagccaggttatgaaacgcagcagagaatcttgaaataattaacaaacaaaggagttacagttagaaattgtaggagagatctcgtttttcgcgacaatctggcgtttttcttgctaattccaggattaatccgttcatagtgtaaaaccccgtttacacattctgacggaagatatagattggaagtattgcattcactaagataagtatggcaacactggaacagacatgaattatcagaacgacgatttacgcatcaaagaaatcaaagagttacttcctcctgtcgcattgctggaaaaattccccgctactgaaaatgccgcgaatacggttgcccatgcccgaaaagcgatccataagatcctgaaaggtaatgatgatcgcctgttggttgtgattggcccatgcagtattcatgatcctgtcgcggcaaaagagtatgccactcgcttgctggcgctgcgtgaagagctgaaagatgagctggaaatcgtaatgcgcgtctattttgaaaagccgcgtaccacggtgggctggaaagggctgattaacgatccgcatatggataatagcttccagatcaacgacggtctgcgtatagcccgtaaattgctgcttgatattaacgacagcggtctgccagcggcaggtgagtttctcgatatgatcaccccacaatatctcgctgacctgatgagctggggcgcaattggcgcacgtaccaccgaaagccaggtgcaccgcgaactggcaagtgggctttcttgtccggtcggcttcaaaaatggcaccgacggtacgattaaagtggctatcgatgccattaatgccgccggtgcgccgcactgcttcctgtccgtaacgaaatgggggcatagcgcgattgtgaataccagcggtaacggcgattgccatatcattctgcgcggcggtaaagagcctaactacagcgcgaagcacgttgctgaagtgaaagaagggctgaacaaagcaggcctgccagcacaggtgatgatcgatttcagccatgctaacagctccaaacaattcaaaaagcagatggatgtttgtgctgacgtttgccagcagattgccggtggcgaaaaggccattattggcgtgatggtggaaagccatctggtggaaggcaatcagagcctcgagagcggggagccgctggcctacggtaagagcatcaccgatgcctgcatcggctgggaagataccgatgctctgttacgtcaactggcgaatgcagtaaaagcgcgtcgcgggtaaggtttaattgtcggatgcgccgtcagagtggcgtatccgatgaatcaccacaggcctgataagtcgcgcagcgtcgcatcaggcaatgtgctccattgttagcaacaaaaaagccgactcacttgcagtcggctttctcattttaaacgaatgacgtttacttcgctttaccctggtttgcaaccgccgctgctttcgctgcgatctcgtcagcattacccagataatagcgtttcagcggtttgaaattctcgtcgaactcatacaccagcggcacgccagtcgggatattaagctcaagaatctcttcttcgctcatgttatcaagatatttcaccagcgcacgtaaagagttaccgtgtgcagcgatgatcacgcgctcaccgctcttcatacgcggcagaatagtttcattccagtaagggatcacgcggtcaatggtcagcgccaggctttccgtcagcggcagttctttctcgctcagtttcgcgtaacgcggatcgtgacccggataacgctcatcatctttagtcagttccggcggagtcactgcaaaaccacgacgccactgtttcacctgctcgtcgccatacttttcagcagtttccgctttgttcagaccctgcaacgcaccgtagtgacgttcgttcagtttccaggatttctcaacgggcagccatgcctgatccagttcgtccagcacattccacagggtatggatagcgcgtttcagcacagaagtgtaagcaaagtcaaagctgtaaccttcctctttcagcagcttacctgctgcttttgcttcgcttacgcctttctcagacagatccacgtcgtaccaaccggtgaaacggttttctttgttccactgactttcgccatgacgaaccagaaccagcttagttacagccatatacttactcctcaaatcatcttttaatgataataattctcattatattgccgcgacgaagcaacagcaatgcttacgcataaccatagcgaaaatagtggcgcagtgtaaggttgttgtgaatattgagttgcaaatatgtcggtgtttgctggtgatttgaacaatatgagataaagccctcatgacgagggcgtaacattactcagcaataaactgatattccgtcaggctggaatactcttcgccaggacgcaggaagcagtccggttgcggccattcagggtggttcgggctgtccggtagaaactcgctttccagagccagcccttgccagtcggcgtaaggttcggttccccggctcggtgtgccgccgaggaagttgccggagtagaattgcagagccggagcggtggtgtagaccttcagctgcaatttttcatctgcactccagacatgcgccgccactttcttgccatcgcctttggcctgtaacaagaatgcgtgatcgtaacctttcactttgcgctgatcgtcgtcggcaagaaactcactggcgatgattttggcgctgcggaaatcaaaagacgttccggcgacagatttcaggccgtcgtgcggaatgccgccttcatcaaccggcagatattcgtccgccagaatctgcaacttgtgattgcgcacgtcagactgctcgccgtcaagattgaaatagacgtgattagtcatattcaccgggcaaggtttatcaactgtggcgcgataagtaatggagatacggttatcgtcggtcagacgatattgcaccgtcgcgccgagattacccgggaagccctgatcaccatcatcactactcagggcaaacagcacctgacgatcgttctggttcacaatctgccagcgacgtttgtcgaacccttccggcccgccgtgcagctggttaacgccctgacttgggctaagcgtcacggtttcaccgtcaaaggtataacggctattggcgatacggttggcataacgaccaatagaggcccccagaaacgcggcctgatcctgatagcattccgggctggcacagccgagcagcgcctcgcggacgctgccatcggaaagcggaatacgggcggaaagtaaagtcgcaccccagtccatcagcgtgactaccatccctgcgttgttacgcaaagttaacagtcggtacggctgaccatcgggtgccagtgcgggagtttcgttcagcactgtcctgctccttgacttggtttacaaacgtaaaaagtctctttaatacctgtttttgcttcatattgttcagcgacagcttgctgtacggcaggcaccagctcttccgggatcagcgcgacgatacagccgccaaatccgccgccggtcatgcgtacgccacctttgtcgccaatcacagctttgacgatttctaccagagtgtcaatttgcggcacggtgatttcgaaatcatcgcgcatagaggcatgagactccgccatcaactcgcccatacgtttcaggtcgccttgctccagcgcgctggcagcttcaacggtgcgggcgttttcagtcagtatatgacgcacgcgttttgccacgatcgggtccagttcatgcgcaacagcgttgaactcttcaatggtgacatcacgcagggctggctgctggaagaaacgcgcaccggtttcgcactgttcacgacgggtgttgtattcgctgccaaccagggtacgtttgaagttactgttgatgatgacgacagccacacctttgggcatggaaactgctttggtccccagactgcggcaatcgatcagcaaggcatgatctttcttgccgagcgcggaaattagctgatccatgatcccgcagttacagcctacaaactggttttctgcttcctgaccgttaagcgcgatttgtgcgccgtccagcggcagatgataaagctgctgcaatacggttccgaccgcgacttccagactagcggaagaacttaacccggcaccctgcggcacattgccgctgatcaccatgtccacgccgccgaagctgttgttacgcagttgcagatgtttcaccacgccacgaacgtagttagcccattgatagttttcatgtgcgacaatgggcgcatcgagggaaaactcgtcgagctgattttcataatcggctgccatcacgcgaactttacggtcatcgcgtggtgcacaactgatcacggtttgataatcaatcgcgcagggcagaacgaaaccgtcgttgtagtcggtgtgttcaccaatcaaattcacgcggccaggcgcctgaatggtgtgagtggcagggtagccaaatgcgttggcaaacagagattgtgttttttctttcagactcatttcttacactccggattcgcgaaaatggatatcgctgactgcgcgcaaacgctctgctgcctgttctgcggtcaggtctcgctgggtctctgccagcatttcataaccaaccataaatttacgtacggtggcggagcgcagcagaggcggataaaagtgcgcgtgcagctgccagtgttgattctcttcgccattaaatggcgcgccgtgccagcccatagagtaggggaaggagcactggaagaggttgtcataacgactggtcagctttttcaacgccagcgccagatcgctgcgctgggcgtcggtcaaatcggtgatccgtaaaacgtgggctttgggcagcagtagcgtttcgaacggccaggcagcccagtaaggcacgacggctaaccagtgttcggtttcgacaacggtacggctaccgtctgccagctcgcgctgaacataatccaccagcattggacttttctgttcggcaaaatattctttttgcaggcggtcttcgcgctcagcttcgttaggcaggaagctatttgcccaaatctgaccgtgcggatgcgggttagagcagcccatcgccgcgcctttgttttcaaaaacctgcacccatgggtacgttttccccagttctgcggtttgctcctgccaggttttgacgatttccgtcaatgctgcaacgctgagctctggcagcgttttactgtgatccggactaaagcagatcacccggctggtgccgcgcgcgctctggcaacgcatcagcggatcgtgactttctggcgcatctggcgtgtcagacatcaaagccgcaaagtcattagtgaaaacgtaagtcccggtgtaatcggggtttttatcgcctgtcacccgcacattacctgcgcagaggaagcaatctggatcgtgcgcaggtaacacctgtttggctggcgtttcctgcgccccctgccaggggcgcttagcgcggtgcggactaaccagaatccattgcccggtgagcgggttgtagcggcgatgtggatgatcaacgggattaaattgcgtcatggtcgttccttaatcgggatatccctgtggatggcgactctgccagtgccaggtgtcctgcgccatttcatcgagtgtgcgcgttacgcgccagttcagttcacggtcggctttgctggcgtccgcccagtaggccggaaggtcgccctcgcgacgcggtgcaaaatgataattaaccggtttgccgcaggctttgctgaaggcattaaccacgtccagcacgctgttgcctacgccagcgccgaggttgtagatgtgtacgcctggcttgttcgccagtttttccatcgccacgacgtgaccgtccgccagatccattacgtggatgtaatcgcgtacgccagtaccatcttcggtcggataatcgttaccaaaaatcgccaggctgtcgcgacggcctacagcaacctgggcgatgtatggcatcaggttattcggaatgccttgcggatcttcgcccatatcgccgctcggatgcgcgccaaccgggttgaagtagcgcagcagggcaatgctccagtccggctgggctttttgcagatcggtgaggatctgttccaccatcagcttgcttttgccgtaagggctttgcggtgtgccggtcgggaagctttcaacgtatggaattttgggctgatcgccataaacggtggcggaggagctaaaaataaagtttttgacgttagcggcgcgcatggcgctaatcaggcgcagagtgccgttgacattgttgtcgtaatattccagcggtttttgtacgctttcgcccacggctttcagcccggcgaagtggatcacggtgtcgatagcgtgatcgtgcaggatctcggtcatcaacgcttcgttacgaatatcgccttcaacaaacgttggatgtttgccgcctaaacgctcgataacaggcagtacgctgcgcttactgttacagaggttatcaagaatgatgacatcatgaccgttttgcagtaattgcacacaggtatgacttccaatgtaaccgctaccaccggtaaccagaactctcataattcgctccattaggcttatggtatgaaataaccatagcataacaaagatgcgaaaagtgtgacatggaataaattagtggaatcgtttacacaagaatttagccgttttttatgcgcgattaagtgattataaaacagagggtttatgaatgattgcgctttttatctgaaaaaagacgcggtttcatgcctgcatgcgtcgaaccgttggccggagagggtgctaaggccgcctccggcaaggtcagcactaccgactcaatatatttttgtcagcacatagcgatagagtccaccgtccggcacgaactcaagacgatgggtaatacaggcaggcgcatcttcagcgtggtggctaacaaacaacaattgcgtttcaccttcgctaatcagcacatcaacaaaacggcggataagctggcgattcagcggatcaagcccctgtagtggttcatcgagaataagcaacgtcggatgtttcaccagtgcgcggacaatcagcgccagacgctgctgtccccaggaaagactatggaacggagcgtcagccgtgcgtttatcaatgccgagaatatccagccactgctgcaccagtttttgctggcgatcgctaacggcctgataaatgccaatgctatcaaaatagccagaaagaatcacattacgcacggtagtgctgacccggtaatccagatgcaaactactgctgacgtaaccgatatgctttttgatatcccagatggtttcgccgctgccgcgacgtcgtccgaaaagcgtcaaatcgttgctgtaaccttgcggatgatcgccagtaaccaggcttaataacgtgctttttcctgcaccatttggcccgacaatttgccagtgttcgcctggattcacctgccagctaaggttattaagaatggggcgatcgttataagaaaccacgccattgttcagcacaatgcgcggttcgttggcgggtaaggcgtgacgtgcactaggttcatccggctccggcagttgcacaccttcaagctgttcactatgcgccagttgcgcgacgagtgcttgttggagcagttcctctttagcgccagtttccgctaacgtgcaatccgccagcacgccagcaaactggacaaactccgggatctcatcgaagcgattgagcaccagtaccagagtaataccggactgatgtaagctggcgagtcgctcagccagctgctgacgactggcaacatccaggccatcgaacggctcatcaagaatcaacaagtcaggctcgctcatcagcgcctgacacagcagggtttttcgcgtctcgccagtggaaaggtatttaaagcgtcggtcgaggagggcggtaataccgaactgctgcgccagttgcatgcaacgcggtgcatcctttacttcatcctgaatgatctcagccgtagtgcgtccggtgtcatcttcgccagggccgagcatatcggtgttattccgctgccattcgtcgctgacgagtttttgcaattgctcgaaggagagacgagtgatgtgggaaaactggctttgccgttcacctttcaaaagcggaagttcccccgccagcgcgcgggccagggcgcttttcccgcttccattgctaccgacaaacgcccaactatcacccgcgtttaacgttagctgaggcaattgcagcgtttttgtgtcgctaagacgaaacgtgccttgcaaaatttgcaagctactcattttatatcccactttgtgcagcgattactgacagggatacgtgtttcataacaaattgtcaacacgcttagcacagcgtggcgataatcacgctgtcggcattaaagtaggccgtgacattctgtccttgctgaagagaagtcgcttcatttaccggcactgtggcgcacagtgtttgcccgtcgggtagcgccattaatacttcgcactgctctgcgccgcgctcaatatgactaataatacccggtaattggttgtcagcgttttgcgcgaccgcctcgtcctgagtaatacctacccacggcgcttttagcaatatcaacacttctttgccttcatccagccccagacgcgcgccgctttgtgcggtaattgcgactttcaggcgtgtttttccgtcagccagtaagacatcaacatgctgttgaacgtcatcatgatcgcgggcggtgatggtaccgaaccactggttacgggcgctggtttgcagactaaaacgactgatcgcggccagcaggctgttcagcggcagggcgtcatcgtcacttaacacatcaaaggctttttgctggatttgcgccagtaagtcatagagctgaatcagtcgctgaccatagcgggtcagtactgcgccgccgccacctttaccgcctgttgcgcgctcgaccagaatatgctcacttaactgattcatctcgttaatggcatcccaggcgcttttatagctaataccggcatctttcgctccctggctaatggaaccggaaagcgcaatgtgttttagtaggctaatgcggcgcgggtcggcgaataatttttgttggagcttaagggtgagaaggatttcggcctgcataacaatgtcctggcaaaagtcttattgtgacggaaaacgaacgccacgcaaagctgaccgcacaaaaggggagtgcttttctgtgcttagcggttagaatagtctcatgactatatctggagttgaccatgttagagttattaaaaagtctggtattcgccgtaatcatggtacctgtcgtgatggccatcatcctgggtctgatttacggtcttggtgaagtattcaacatcttttctggtgttggtaaaaaagaccagcccggacaaaatcattgattccctgaatgcccgcttagtcgggcattttctttttctcaacttcctgcttttcctgccgatattttttcttatctacctcacaaaggttagcaataactgctgggaaaattccgagttagtcgttatattgtcgcctacataacgttacattaaggggttaccaatggctcgtaaatggttgaacttgtttgccggggcggcactctctttcgctgttgctggcaatgcactggcagatgaagggaaaatcacggtgttcgccgccgcaagtctgactaacgcaatgcaggacattgctacgcagtttaaaaaagagaaaggcgtggatgtggtttcttctttcgctagcagttctactctcgcccgtcagattgaagcgggtgcgcctgcggatctgtttatttctgccgatcagaaatggatggattatgcggttgataaaaaagcgatcgatacagctacgcgtcagacactgctcggcaatagcctggtcgttgtagcaccgaaagccagcgtgcagaaagatttcaccatcgacagcaaaaccaactggactagtctgctgaatggcggtcgcctggcggttggcgatccggaacatgttcccgctggcatttatgcaaaagaagcactgcaaaaactgggcgcatgggatacgctctctccgaaactggccccagcggaagatgttcgtggggcgctggcgctggtcgaacgtaacgaagcgcctctgggcattgtctacggttctgacgcagttgccagcaaaggggtaaaagtggttgccaccttcccggaagatagtcataaaaaagtggaatatccggttgctgttgtggaagggcataacaatgcgacagtgaaagcattttatgattatctgaagggaccgcaggcagcggaaatctttaaacgttacggatttacaatcaagtaatgatactgaccgatccagaatggcaggcagttttattaagcctgaaagtttcttccctggctgtgctgtttagcctgccgtttgggatcttttttgcctggttactggtgcgttgcacgtttccgggcaaagctctgctcgacagcgtactgcatctaccgctggtgttaccgcccgtggtcgtcggttacttattattagttagcatgggacggcgcggatttatcggtgaacgtctgtatgactggtttggtattaccttcgcctttagctggcgcggcgcggttctcgctgccgccgtcatgagctttccgctgatggtgcgggcaattcgtctggcgctggaaggggttgatgtcaaactggaacaggccgcaagaacactgggggccgggcgctggcgcgttttctttactatcacgttaccgctgaccttaccgggaattattgttggtacggtactggcttttgctcgttctctcggtgagtttggtgcaaccatcacctttgtgagcaacattcctggtgaaacgcgaaccattccttctgccatgtataccctgatccagacccccggcggggaaagtggagcggcgagactgtgcattatttctattgcgctggcgatgatctccctgttgattagtgaatggctggccagaatcagccgtgaacgggcggggcgctaatcatgctggaactgaatttttcccagacgttgggcaaccattgcctgactattaatgaaacgctgcccgccaatggcatcactgctatctttggcgtctccggtgccggaaaaactagcctgattaacgccatcagtggactgacgcgcccgcaaaaagggcggattgtcctcaatgggcgggtactaaatgatgccgaaaaaggtatctgcctgacgccggaaaagcgtcgcgttggctatgtttttcaggatgcgcggctgttcccgcattacaaagtgcgtggcaatctgcgctacggcatgagcaaaagtatggtcgatcagttcgataagctggtggcgcttttaggcattgaaccgttgcttgaccgtttaccaggcagcctgtccggaggcgaaaaacagcgcgtggcgattggtcgggctttgctgacagcaccggaattgctgttgctggatgaaccgctggcgagtctggatattccgcgtaaacgcgaactgttgccttatctgcaacggctgacacgggaaatcaacattccgatgttgtatgtcagccatagcctggatgagatcctccatctggcagacagagtgatggtactggaaaacggtcaggtgaaagcctttggcgcgctggaggaagtgtggggcagtagcgtgatgaatccgtggctgccgaaagagcaacaaagtagcattctgaaagtgacggtgcttgagcatcatccgcattacgcgatgaccgcgctggcgctgggcgatcagcatttgtgggtcaataagctggacgaaccgctgcaagctgcgctacgtatccgcattcaggcttccgatgtttctctggttttacaaccgccgcagcaaaccagcattcgtaacgtattgcgggcaaaagttgttaatagttatgacgacaacggccaggtggaagtggaactggaagtcggcggtaaaacgctgtgggcgcgtatcagcccgtgggccagggatgaactggcgatcaaacctggcctgtggctgtacgcgcaaattaaaagtgtgagcataaccgcctgattaaatcaggtggctataaatgaactgggcaatgctgtcggtggtgttatcaccaatcacaatgttggcgcgcgcttttaccgcgtcatcggcgttgcccatcgccacgcctgtaccagcggcttccagcatactgatatcattaaagttatcgccgaatgccacgacgttttccatgctccaaccttgcgcctcaacccatttcgtcaaacgtttacctttgctgttgccgccgcgtgcaatatcaacctgatcgtgccaggaccattcacactccagtcccagttcatgttcgacatgcttaccaaaatgctgcaattgcggcaggtcatcgtgcgtcagggcgaacttccatacggcgttaacttgttgcgccgtttcagccagagaagcgacttgtgtgaaagtcggacgctgttccggcggcagggtttgcgcccagttagatgtgcgaatgacatgcccggtcgggtgctcatagaccattgcatcatcgacatacatcagaccgtgaatgtggtgttcattcagcatctcaatgagttgcagggctttaataacgggcattgggtccgcttccagcacggtttttgcatgataatcatacaaataggtgccattacagcaaatagcaggtgtatccagcgccagcgcctgataaaaaggatgaatagcgacgtgatggcgacctgtgacgatgattaattgatagcctgcttcgcgagcgcgggccagggcttctatgctactaggaagcagggtctttttcggggtcaataaggtgccgtctaagtcgagagcaatcacgcgtgtggtcatggcgtattccagattaaggttaagaattttcgtctgcgcgaatggtacaccgataccactatcggacaaaattctgcgttttaattcagcattcaccgccaaaagcgactaattttagctgttacagtcagttgctaaatgcaaaggagcattcatgaagcaaacagtttatatcgccagccctgagagccagcaaattcacgtctggaatctgaatcatgaaggcgcactgacgctgacacaggttgtcgatgtgccggggcaggtgcagccgatggtggtcagcccggacaaacgttatctctatgttggtgttcgccctgagtttcgcgtcctggcgtatcgtatcgccccggacgatggcgcactgacctttgccgcagagtctgcgctgccgggtagtccgacgcatatttccaccgatcaccaggggcagtttgtctttgtaggttcttacaatgcgggtaacgtgagcgtaacgcgtctggaagatggcctgccagtgggcgtcgtcgatgtggtcgaggggctggacggttgccattccgccaatatcagtccggacaaccgtacgctgtgggttccggcattaaagcaggatcgcatttgcctgtttacggtcagcgatgatggtcatctcgtggcgcaggaccctgcggaagtgaccaccgttgaaggggccggcccgcgtcatatggtattccatccaaacgaacaatatgcgtattgcgtcaatgagttaaacagcagtgtggatgtctgggaactgaaagatccgcacggtaatatcgaatgtgtccagacgctggatatgatgccggaaaacttctccgacacccgttgggcggctgatattcatatcaccccggatggtcgccatttatacgcctgcgaccgtaccgccagcctgattaccgttttcagcgttagcgaagatggcagcgtgttgagtaaagaaggcttccagccaacggaaacccagccgcgcggcttcaatgttgatcacagcggcaagtatctgattgccgccgggcaaaaatctcaccacatcagcgtatacgaaattgttggcgagcaggggctactgcatgaaaaaggccgctatgcggtcgggcagggaccaatgtgggtggtggttaacgcacactaaccgctgatttacccggcgcagtctctcctgcgccggtgtattaacctatctcctgtaacgcgtgtctctggcgttcgacgatattggtccacaaattgtctttatcgtcagtccataaattaatcagcaaggcaaaaaagcgttctgctgctggagaaagtacggcatctttacggcgaattattcccaatgttcgacgtataacgggttccaccaatgggataccaataatgctagaatagggcgcatgaggcattgccaggccaggaagcgcgctaatccccagtcccgcctccaccagtcctaaactcgtgctaagatgacgcacttcgtaaaaccagtccagcttccagggcttgtcggccagctgttgttctatcaacagtcggttgccgctggaggagcgtacgccaatcattttgtaacccactaactcctgccattctacaagctgctttttggccaatggatggtcacgccgacaggccagcacgaacggctcgttgaccagtggggtaaaatcaatggaactatttgtgacgttgttcatgtttatgccaaagtcactttcgttacacagcacgctttccatgcaattattcgtgccttgttccagaatccgcactttaatattgggatacagctcattaaatttaccgattgccagcggtaaaaaataaaatactgcggtcggaatacacgctaacgtcaccataccacgatgataagcattcatatcacgaatattaaaaagcgtttcatcgaatttctttattaattcccgcgcctccgggagcaacctttttcctgcttttgttaacgtaaccttgcgagttgtacgctcaaatagttgaacatgtaaatcttcctccatcttttttattcttcgcgttaatgcaggttgcgtaatattgagtaatttagcggcattgttaaagctactggactctgccagtatgacaaatgccttcatactacttaattcatgcttcattattactccggaaaatggaaggctgctttttgggtggctggccgttaaaaattttaactgcatttagccaacttaaattaatgaaaaaatgttattaatcgttgagctaaagtcattagagatgctttgcccttaatgtaaccatatcgcaataagttatgtttttaaattgagggcattattatgaaaaaaataccctgcgtgatgatgcgaggtggaaccagcaggggcgcgttcctgttagcggaacatttacccgaagatcaaacgcagcgcgataaaatattgatggcaattatgggttccggtaacgatctggaaattgacggtattggcggcggtaatccactgaccagtaaagtcgccattattagccgttccagcgatccgcgtgctgatgtcgattatctgtttgcgcaggtaatcgttcatgagcaacgtgtcgataccacgcctaactgcggcaatatgctgtctggtgttggggcattcgccattgaaaatggtttgattgcagcgactagcccagttactcgcgtacgtatccgcaacgtcaatacgggtacgttcatcgaagctgatgtgcaaacgccaaatggtgttgtcgagtacgagggtagcgccagaattgacggcgtaccgggtactgccgcaccggttgcgctcactttcctgaatgccgctggaaccaaaaccggaaaagttttcccgactgataatcagattgattattttgacgatgtcccggtgacctgtatcgatatggcgatgccagtcgtcattattccggctgaatatctgggaaaaacaggttatgaattaccggcggaactggatgccgacaaagcattattagcccgcattgaatctatccgtctacaagcgggtaaagcaatgggcttaggtgatgtcagtaatatggttatccctaaacctgtgcttatttctccagcgcagaaaggcggggcaattaatgtgcgttattttatgccgcattcttgccatcgcgcgctggcgataaccggtgctattgctatttccagtagttgtgcattggaaggcaccgtcacccgacaaatcgtcccttctgtaggatacggcaatatcaatattgaacaccccagtggtgcgctcgacgttcatttaagtaatgaaggtcaggatgccacgacgttacgcgcatctgttattcggacgaccagaaaaatattttccggtgaagtttatcttccctgaaaaaattcgttgtcaggataaggacaatcaataaaggacttctgtatgagtcatacagaaagaacaggattttaaatgaataagaaaagcttatggaagctaattctgatattagcgatcccatgtattattggttttatgccagctccggcaggattaagcgaactggcgtgggtgctttttggtatttacctggcggccattgtggggctggttatcaagcctttcccggaacctgtcgtactgttaattgccgttgctgccagtatggtggtggtcggtaacttatccgacggtgcgtttaaaaccaccgccgtattaagcggttactctagtggtaccacctggctggtgttcagcgcgtttaccttaagcgccgcatttgtgaccaccggtttaggtaaacgtattgcctatctgctgattggtaaaatcggtaacaccacgctgggtctgggttacgttacggtattcctcgatctggtactggctccggcaacaccgtctaacaccgcgcgtgcgggcggcattgtgttaccgatcatcaacagcgtggcggtggctttggggtccgaaccggaaaaaagtccgcgtcgtgtcggacattacctgatgatgtccatttacatggtcaccaaaaccaccagctatatgttctttaccgcaatggcggggaacattctggcgctgaaaatgatcaacgacattctgcacctgcaaattagctggggtggatgggcgctggcagccggattgccgggcatcattatgctgctggtcaccccgctggtgatttacaccatgtatccaccagaaattaagaaggtggataacaaaaccatcgctaaagcgggccttgccgaactaggaccgatgaaaatccgcgaaaaaatgctgctcggtgtctttgtgctggcgctgctgggctggattttcagtaagtctctgggggttgatgaatccaccgtggcaatcgttgttatggcaaccatgctgctgctgggtatcgttacctgggaagacgtggttaaaaataaaggcggctggaataccttaatctggtacggcggtattatcggcttaagctccttattaagcaaagttaaattcttcgaatggttagctgaagtctttaaaaataacctggcatttgatggtcacggtaacgttgctttcttcgttattattttcctcagcattatcgtgcgttatttcttcgcttccggtagtgcctatatcgttgctatgttaccggtatttgccatgctggcgaacgtctccggcgcaccgttaatgttaaccgcgctggcactgttgttctccaactcctatggcggcatggttactcactatggcggcgcggcaggtccggtcatctttggcgtgggttataacgatattaaatcctggtggttggtcggtgcggtactgacgatattaaccttcctggtgcatatcaccctcggcgtgtggtggtggaatatgctgatcggctggaacatgctgtaaatattctcgtcatacttcaagttgcatgtgctgcgtctgcgttcgctcaccccagtcacttacttatgtaagctcctggggattcactcgcttgtcgccttcctgcaactcgaattatttagagtatatccatttattatctttctgcgcacttcacggtgcgcagatatctggagcatttgatgatcaagttatctgaaaaaggcgtgtttctcgccagtaataacgaaataattgccgaagaacatttcaccggcgaaattaaaaaagaagaagccaaaaaaggcactattgcctggtctattctctctagccataatacgtccggaaatatggataaacttaaaattaagtttgatagtttagcctctcacgatattacctttgttggtattgtacagaccgctaaagcgtccggtatggaacgtttcccgctgccgtatgtgctgaccaactgccataacagtctctgcgccgtcggcggcactattaacggtgatgaccatgtttttggtttaagcgcggcccagcgttatggcggtatttttgtgcctccgcatattgcggtcatccatcaatatatgcgtgagatgatggcaggcggcggcaaaatgatcctcgggagtgacagccacacccgttacggtgcattagggacaatggcagtcggtgagggcggcggtgagttggtaaaacagctgcttaatgacacctgggatatcgactatccgggcgtggttgcggtgcatctgaccggaaaacctgcgccgtatgtggggccacaggatgtggcgctggctatcattggcgcggtgttcaaaaacggttacgtcaaaaacaaagtcatggagttcgttggaccgggcgttagcgcgctctctaccgatttccgtaacagcgttgacgtgatgaccactgaaacgacctgtttaagttctgtctggcaaaccgatgaagaagtccataactggctggcgctgcacggtcgcggccaggattactgccagcttaaccctcaaccgatggcgtactacgatggctgcatcagcgttgatttaagcgccatcaaaccaatgattgcgctgccgttccacccgagcaacgtgtatgaaatcgacacactgaaccagaacctgaccgacattctgcgtgagattgaaattgagtccgaacgcgtggcgcacggtaaagccaaactcagcctgctggataaagtggaaaatggtcgcctgaaagtgcagcaggggattatcgcgggctgttctggcggtaactacgaaaacgtcatcgcggcggcgaatgcactgcgcggtcaatcctgtggcaatgacaccttcagcctggcagtttacccgagtagtcagccggtgtttatggatctcgccaaaaaaggtgtggtagcagatttgattggcgcaggcgcaatcatcagaaccgcgttctgcggcccatgctttggcgcgggcgatacgccaatcaacaacggtttgagtattcgccacaccacgcgtaacttcccgaaccgcgaaggctctaagccagctaatgggcagatgagtgcggtggcgttgatggacgctcgttctatcgctgcgactgcggcaaacggtggctatttaacctctgccagcgaacttgattgctgggacaacgtgccggagtacgccttcgatgtaacgccgtataaaaaccgtgtttatcagggctttgtgaaaggggcaactcagcaaccgctgatttacgggccgaacattaaagactggccggaattgggtgcgctgactgacaatatcgtcctgaaagtgtgcagcaagatcctcgacgaagtgaccaccaccgacgaactgattccttccggtgaaacctcttcttatcgtagtaatccgattggtctggcggagtttaccctgtctcgccgcgatcccggttatgttagcagaagtaaagcgactgctgagctggaaaatcagcgtctggcggggaatgtcagcgagctgacagaggtgtttgcgcgcattaagcagattgctggtcaggagcatattgatccgctgcaaactgaaattggcagcatggtctatgcggtgaaaccaggcgatggttctgcgcgtgaacaggcggcgagctgccagcgtgtgattggcggtctggcgaatattgccgaggagtacgcgactaaacgctatcgttctaacgtcatcaactgggggatgttaccgctgcaaatggcggaagtaccaacctttgaagtgggggattacatttacatccctggcattaaagcggcgctggataatccgggtacgacgtttaaaggttatgtgatccatgaagatgcgccggtaacggaaattacgctctatatggaaagtctgactgctgaagagcgcgagattatcaaggcgggtagtttgattaacttcaataaaaaccgtcagatgtaaaaagcgccatgtgaatgtaggtcgcattcggcacttattgtcggatgcgatgcttgcgcatcttatccgacctacgaatcgcatcgaatctgtaggccagataaggcattttcgcagcatccggcacttattgtcggatgcgatgcttgcgcatcttatccgacctacaaatcgcatcgaaccgtaggccggataaggcgtttacgccgcatccggcaaatagttaattgctcttacttcttcgcctctgcaaccactttactacccacgccgcggttattgtattcccacatgcggttgtagttagtgtcattcagattgcgctgtatttcgtcgttatcatctacgctgccggtattacccgcaaacggacgattagagatcaccgcatcggcccacggtttagccgtgttaaaaccttcgttgatggcgctatcacggatcaccacctgaccgttggtattggcatcaacatccaggctgcggcccagttgcgccacaccatcaccgaaagcattgaaacggctgtttacggcgaggaaaccgtagtaaatgttggacagcgtagccggtgcaaacacatacgcttcttgctgagtacgactgttcaccacgcggaattcggtgttatcgaacaccactgcgccgcgaccagaaacgatatccacatccccttcaatgtagctgttggtcaccagcgtacgcggctgacgattcgtttccagacggttctgcacaccgctgttggtgacaaagaaggtgttctgacgaccgagaatgttaacgttgttaatctgtacctggtcaccatcagtacgcagtgccaccgccggatggttacctgcatctacgctatcgcccagcgtgttttcgatggtcagattttgcagttgcaggccattgttttgactccagaagaccgcagagcagagaacaccgatactgtcgctgcgtttgctctggcagctatcgtacatataccacgctggtttacctggcatatatttgccgcgcgggttgacgtcgtgacgccagtcggcagggctcatgccaccatcaagggaaagcccaatcttcacatcaatcggtttttcacctgtaccgtacagagtaattccacccggagcggcagggacatataccgttccctgatactcaccaggcatcacggcaatatactggcgcttgttggtacgcttgataattgccgcatctaccgccgcctgaatcgtggtatgcgttacaccttgagtgcccgccgggccgacaacaaagtcaggttgcgcaggcagggtaatcggggaaggattccacgctgcagcacctggtgtcagggatgcaaaatagtgttgagcatcgaaattctgcgcttcttttgcgctcagaatcgggcgagaagaggtaccaggcgcggtttgatcagaaggacgttgatcgggcggggtactgctacaggcggtcagcgtcacgccaaaagccaatgccagcgccagacgggaaacactaaatgtgttcacaggttgctccgggctatgaaatagaaaaatgaatccgttgaagcctgcttttttatactaacttgagcgaaacgggaaggtaaaaagacaaaaagttgtttttaatacctttaagtgataccagatggcattgcgccatctggcagagtgattaactaaacatcgcagtaatgctggcgcttgccagagagtggaaatgaacgttaaacccgaccatcgcgccgctggcaccttcatcgacatcaatacgttctatatccagcgcgtgaacggtaaaaatgtagcgatgagtttcgcctttcggcggtgctgcgccatcgtacccggttttaccaaagtcggtacgcgtctgcaaaacgccgtctggcattgctaccagaccagagccaaacccttgcggtaatacgcgggtatcagcgggtaagttaacaactacccagtgccaccagccggagccggttggcgcatccgggtcgtagcaggtgacaacaaaacttttcgttcccgcaggaacatcatcccacgccagatgcggactaatattatcgccatcgtaacccatgccgttaaagacatgacgatgcggcaatttatcgccatcgcgcagatcgttactgatgagtttcatgaaccctcctttcttgtttgcagaaagtgtagccagaaaccctcacgcggacttctcgttattggcaaaaaaatgtttcatcctgtaccgcgcggttaaccgctgcggtcagacgctgcaactgttgcgggagaataatatagggcggcatcaggtaaatcagtttgccaaaaggccggatccagacaccctgttcgacaaagaatttttgcagcgccgccatattcaccggatgagtggtttcgaccacgccaatggcccccagtacgcgcacatcggcaaccatttcggcatcacgggcgggggcaagttgctcgcgcagctgtacttcaatatccgccacctgttgctgccagtcgccagattcgagaatcgccaggctggcgtttgctgccgcgcaggccagcggattgcccataaaagttggcccatgcataaagcaaccggcttcaccgttactgatggtttctgcaacctcgcgcgtggtgagtgtggcggaaagggtcattgtgccgccggttaaggctttaccgaggcacaaaatgtccggcgcgatttctgcatgttcacaggcaaacagtttcccggtacgaccaaatccagtggcgatctcgtcggcaatcagcaagataccttcgcgatcgcatattttgcggattcgttttaaccattccggatggtacatgcgcatcccgcctgcgccctggacaatcggctcaatgatcaccgccgcgatttcatgacgatgcgccgccatcaggcgggcaaagcccaccatatcgcgctcatcccattcgccatccatgcggctttgcggggcgggagcaaacaggttttctggcaggtagcctttccacagactgtgcatactgttatccggatcgcacacgctcatcgcgccaaaggtatcgccatgataaccattgcggaaggtcagaaaacgctggcgcgcttcgcctttggcttgccagtactgcaacgccattttcatcgccacttccaccgctacggaaccggagtccgcgagaaaaacgcactccagcggttgcggcgtcatcgccaccagtttgcggcacagctcaatggctggcgcatgggtgataccgccaaacatcacatggctcatggcatcaatttggctcttcatcgccgcattaagctgcgggtgattgtagccgtggatcgccgcccaccaggagctcataccgtcaaccaggcgtctgccgtcagacaaaatcagctcgcaaccttcggcgctcaccaccggataaaccggcagaggggaggtcatggatgtgtatgggtgccagatatggcgttggtcaaaggcaagatcgtccgttgtcataatcgacttgtaaaccaaattgaaaagatttaggtttacaagtctacaccgaattaacaacaaaaaacacgttttggagaagccccatggctcaccgcccacgctggacattgagccaagtcacagaattatttgaaaaaccgttgctggatctgctgtttgaagcgcagcaggtgcatcgccagcatttcgatcctcgtcaggtgcaggtcagcacgttgctgagcattaagaccggagcttgtccggaagattgcaaatactgcccgcaaagcagccgctacaaaaccgggctggaagccgagcggttgatggaagttgaacaggtgctggagagcgcgcgcaaagcgaaagcggcaggaagcacgcgcttctgtatgggcgcggcgtggaagaatccccacgaacgcgatatgccgtacctggaacaaatggtgcagggggtaaaagcgatggggctggaggcgtgtatgacgctgggcacgttgagtgaatctcaggcgcagcgcctcgcgaacgccgggctggattactacaaccacaacctggacaccagcccggagttttacggcaatatcatcaccacacgcacttatcaggaacgcctcgatacgctggaaaaagtgcgcgatgccgggatcaaagtctgttctggcggcattgtgggcttaggcgaaacggtaaaagatcgcgccggattattgctgcaactggcaaacctgccgacgccgccggaaagcgtgccaatcaacatgctggtgaaggtgaaaggcacgccgcttgccgataacgatgatgtcgatgcctttgattttattcgcaccattgcggtcgcgcggatcatgatgccaacctcttacgtgcgcctttctgccggacgcgagcagatgaacgaacagactcaggcgatgtgctttatggcaggcgcaaacagcattttctacggttgcaaactgctgaccacgccgaatccggaagaagataaagacctgcaactgttccgcaaactggggctaaatccgcagcaaactgccgtgctggcaggggataacgaacaacagcaacgtcttgaacaggcgctgatgaccccggacaccgacgaatattacaacgcggcagcattatgagctggcaggagaaaatcaacgcggcgctcgatgcgcggcgtgctgccgatgccctgcgtcgccgttatccggtggcgcaaggagccggacgctggctggtggcggatgatcgccagtatctgaacttttccagtaacgattatttaggtttaagccatcatccgcaaattatccgtgcctggcagcagggggcggagcaatttggcatcggtagcggcggctccggtcacgtcagcggttatagcgtggtgcatcaggcactggaagaagagctggccgagtggcttggctatagccgggcactgctgtttatctctggtttcgccgctaatcaggcagttattgccgcgatgatggcgaaagaggaccgtattgctgccgaccggcttagccatgccagtttgctggaagctgccagtttaagcccgagccagcttcgccgttttgctcataacgatgtcactcatttggcgcgattgcttgcttccccctgtccggggcagcaaatggtggtgacagaaggcgtgttcagcatggacggcgatagtgcgccactggcggaaatccagcaggtaacgcaacagcacaatggctggttgatggtcgatgatgcccacggcacgggcgttatcggggagcaggggcgcggcagctgctggctgcaaaaggtaaaaccagaattgctggtagtgacttttggcaaaggatttggcgtcagcggggcagcggtgctttgctccagtacggtggcggattatctgctgcaattcgcccgccaccttatctacagcaccagtatgccgcccgctcaggcgcaggcattacgtgcgagcctggcggtcattcgcagtgatgagggtgatgcacggcgcgaaaaactggcggcactcattacgcgttttcgtgccggagtacaggatttgccgtttacgcttgctgatagttgcagcgccatccagccattgattgtcggtgataacagccgtgcgttacaactggcagaaaaactgcgtcagcaaggctgctgggtcacggcgattcgcccgccaaccgtacccgctggtactgcgcgactgcgcttaacgctaaccgctgcgcatgaaatgcaggatatcgaccgtctgctggaggtgctgcatggcaacggttaataaacaagccattgcagcggcatttggtcgggcagccgcacactatgagcaacatgcagatctacagcgccagagtgctgacgccttactggcaatgcttccacagcgtaaatacacccacgtactggacgcgggttgtggacctggctggatgagccgccactggcgggaacgtcacgcgcaggtgacggccttagatctcagcccgccaatgcttgttcaggcacgccagaaggatgccgcagaccattatctggcgggagatatcgaatccctgccgttagcgactgcgacgttcgatcttgcatggagcaatctcgcagtgcagtggtgcggtaatttatccacggcactccgcgagctgtatcgggtggtgcgccccaaaggcgtggtcgcgtttaccacgctggtgcagggaagcttacccgaactgcatcaggcgtggcaggcggtggacgagcgtccgcatgctaatcgctttttaccgccagatgaaatcgaacagagcctgaacggcgtgcattatcaacatcatattcagcccatcacgctgtggtttgatgatgcgctcagtgccatgcgtagcctgaaaggcatcggtgccacgcatcttcatgaagggcgcgacccgcgaatattaacgcgtagccagttgcagcgattgcaactggcctggccgcaacagcaggggcgatatcctctgacgtatcatctttttttgggagtgattgctcgtgagtaaacgttattttgtcaccggaacggataccgaagtggggaaaactgtcgccagttgtgcacttttacaagccgcaaaggcagcaggctaccggacggcaggttataaaccggtcgcctctggcagcgaaaagaccccggaaggtttacgcaatagcgacgcgctggcgttacagcgcaacagcagcctgcagctggattacgcaacagtaaatccttacaccttcgcagaacccactagcccgcacatcatcagcgcgcaagagggcagaccgatagaaagtttggtaatgagcgccggattacgcgcgcttgaacaacaggctgactgggtgttagtggaaggtgctggcggctggtttacgccgctttctgacactttcacttttgcagattgggtaacacaggaacaactgccggtgatactggtagttggtgtgaaactcggctgtattaatcacgcgatgttgactgcacaggtaatacaacacgccggactgactctggcgggttgggtggcgaacgatgttacgcctccgggaaaacgtcacgctgaatatatgaccacgctcacccgcatgattcccgcgccgctgctgggagagatcccctggcttgcagaaaatccagaaaatgcggcaaccggaaagtacataaaccttgccttgttgtaaccattctgtatttggttaaattgcgagcgagatcgcgtcttcgattgactgcaatttaaccaattaaattctaaaataatcacgaaaaaaattttacttccgcctcatgcggcgaatgtgggaattgcccaggcggcgggggataggggctggagacagttatccactattcctgtggataaccatgtgtattagagttagaaaacacgaggcaagcgagagaatacgcggcttgcacgcgaattggcgttaaagacggctcaaagaaatatcttttattttttaactggttagataaatgcaatggcagtcactgaacaggcatctcttgccataaaactgtcatcactcatcttgacaaatgttaaaaaagccgttgctttggggataacccggtaaggccggagttttatctcgccacagagtaaattttgctcatgattgacagcggagtttacgctgtatcagaaatattatggtgatgaactgtttttttatccagtataatttgttggcataattaagtacgacgagtaaaattacatacctgcccgcccaactccttcaggtagcgactcatgagtaaaccgttcaaactgaattccgcttttaaaccttctggcgatcagccagaggcgattcgacgtctcgaagaggggctggaagatggcctggcgcaccagacgttacttggcgtgactggcagtgggaaaaccttcaccattgccaatgtcattgctgaccttcagcgcccaaccatggtacttgcgcccaacaaaacgctggcggcccagctgtatggcgaaatgaaagagttcttcccggaaaacgcggtggaatatttcgtttcctactacgactactatcagccggaagcctatgtaccgagttccgacactttcattgagaaagatgccagcgttaacgaacatattgagcagatgcgtttgtccgccaccaaagcgatgctggagcggcgtgatgtggttgtggtggcgtctgtttccgcgatttatggtctgggcgatcctgatttatatctcaagatgatgctccatctcacggtcggtatgattatcgatcagcgcgcgattctgcgccgactggcggagctgcaatacgctcgtaatgatcaagcattccagcgtggtactttccgcgttcgtggcgaggtgatagatatcttcccggcagaaagcgatgacattgcacttcgcgtggaactgtttgacgaggaagtggaacgattgagcttatttgacccgctgaccgggcagattgtttccactattccacgttttaccatctacccgaaaacgcactacgtcacaccgcgcgagcgcatcgtacaggcgatggaggagatcaaagaagagctggccgccagacgcaaagtgctgttggaaaacaacaaactgctggaagagcagcggctgacccagcgtacccagtttgatctggagatgatgaacgagctgggctactgtagcgggattgaaaactacagccgcttcctctccggtcgtggaccgggtgagccaccgccgacgctgtttgattacctgcctgccgatgggctgctggtcgtcgatgaatctcacgtcaccattccacaaattggcggcatgtatcgcggtgaccgggcgcgtaaagagacactggtggagtacggcttccgcctgccaagtgcgctggataaccgtccgcttaagtttgaagagttcgaagcattagcgccgcaaaccatctatgttagcgcgacgccgggtaattacgagctggaaaaatccggcggcgatgtggtggatcaggtggtgcgtccaaccggattgcttgacccgattatcgaagtgcggccggtggcgacacaggttgatgatcttcttagcgagattcgtcagcgagcggcaattaacgaacgcgtactggtcaccacactgaccaagcggatggcggaagatcttaccgaatatctcgaagaacatggcgagcgcgtgcgttatcttcacagtgatatcgacaccgtcgaacgtatggagattatccgcgacttgcgtctgggtgagttcgacgtgctggtagggatcaacttactgcgcgaaggtctggatatgccggaagtgagcctggtggcgatcctcgacgctgacaaagaaggcttcctgcgttccgaacgtagcttgatccagaccattggtcgtgcggcacgtaacgttaacggtaaagcgattctctacggcgataagatcaccccaagtatggcgaaagcgattggcgaaaccgaacgtcgccgtgagaaacagcagaagtacaacgaggaacacggaattacgccgcaaggcttgaacaagaaagtggtcgatatcctggcgctggggcagaacattgccaaaaccaaagcgaagggcagaggaaaaagccgcccgattgttgagccggataatgtgccgatggatatgagccctaaagcgttgcagcagaaaatccatgagctggaagggttgatgatgcaacacgcgcagaatctggagttcgaagaagcggcgcaaattcgtgaccagttgcatcagctgcgtgagctgtttatcgcggcaagctaacaggatagcgaagaagactgatgacaaacggaaaacagcctgatgcgctacgcttatcaggcctacattttctccgcaatatattgaatttgcgcggtttgtaggccggataaggcgttcacgccgcatccggcataaacaacgcgcactttgtcttcaataggaagccggaattttccttcggatttccgttaacctaaagcctgtaacgccttttccagcgcgttatgtaacaactggcggtcatgacgatacggaatatcgctggcctccagtacctcctggatcacaatccgctctttcaccgcgctgacatccacttttggcccgacgatgaccgcatcaatgacctttttaccaacatactgctccataattgccagcttgctttccagcttcaaattagccgcaggtaaactcaactcacgccccagattgccgatataaaccatcggcgctggcgtgcggcgtaatgcctgggcgatttccttcagcagcagaattggcatcaggctggtataaaaactgccaggcccaataatgatgagatccgcttcattgatagcgtgaaccgcctcacgcgttgcgggtacattaggcgttaacaataactcttgaatcggcgtagttaactggtcgatattgacctcgccgtaaacttcatgcccctgatcgtcaatcgccatcagatcaacaggatgctcactcattggaatcaaatgcgtatccactttcagcagattacgaattaaattgatggcttccagaggccgcacgctaaggtgatccagcgcctttaacatcaagtttccgagattatgaccggaaagttcgccattgccaccaaaacggtattcaaacatcgcggaggcgacgctcggttccgttatcagctggttgaggcagttgcgcatatcgccccaggcaatgccgccttcactacggcgaatacgccccgtgctgccaccattatcggtggtggtgacgatacccgttaaacgagaacccaaagagctaagactactgagaacgcgtcccagtccatgccctccgccgagagcaacgacacgatcaagatcagccagcgtacgattgcgcatatagtttcctggagtcagattatccgcgctacagtagcgcaaattgcggggaaacagcaattaacctgccaatattgaggatacaaactattttcttctacctctaaaggacgatgcacgctatgcctccctgatgatgtatatcaaagtaaaaccgccattttcccttattctgtagcgaaatagcacgatcatgacgctatatacatgattacatagcgaaagtgtggatggtaaaaatctcatttacacgctagtatcggcataaccactaaacactctagcctctgcacctgggtcaactgatacggtgctttggccgtgacaatgctcgtaaagattgccaccagggcgaaggaagaaatgacttcgcctcccgtatctggaaaggtgtacatggctagtcaactgactgatgcatttgcgcgtaagttttactacttgcgcctgagcattaccgatgtgtgtaactttcgttgcacctactgcctgccggatggctacaaaccgagcggcgtcaccaataaaggctttcttaccgtcgatgaaattcgccgggttacgcgcgccttcgccagactgggcaccgaaaaagtgcgcctgacaggaggagagccgtctttacgccgcgactttaccgatatcatcgccgctgtgcgggaaaacgacgctatccgccagattgcggtcacaaccaatggttaccgtctggaacgcgatgtggcgagctggcgcgatgcgggacttactggcattaacgtcagtgtcgacagtctggacgcccgccagtttcacgctattaccgggcaggataaattcaaccaggtcatggcagggattgatgctgcatttgaggccggttttgagaaggtcaaagtcaataccgtgctgatgcgtgatgttaatcatcaccagctcgacacctttctgaactggatccagcatcgccctatccagctgcgtttcatcgaactgatggaaacgggcgagggcagcgagctcttccgtaagcatcacatctctggtcaggttctgcgtgacgagctactgcgtcgcggctggatccaccaattacgtcaacgcagcgacggtcccgcgcaagtcttttgccatccagattacgccggagagattggccttatcatgccgtatgaaaaagacttctgcgccacttgcaaccgcctgcgcgtttcctccattggtaaactccatctctgcctgtttggtgaaggcggcgttaacctgcgcgatctgctggaagacgatacccagcaacaggcgctggaagcgcgtattagtgcggcgctgcgggagaagaaacagacccatttcctgcatcaaaacaacaccggtattacgcaaaacttaagctacattggcggctaaaacgtcaaaaggagagatcagatgagtcaggtaagcactgaatttatcccgacccgtattgctattcttacggtttctaatcgtcgcggtgaagaagacgatacctccggtcactatctgcgcgatagcgcgcaagaagcgggccatcacgttgtcgataaagccattgtgaaagaaaaccgctacgctattcgcgctcaggtatctgcgtggatcgccagcgacgatgtacaagtggtattgattacgggtggtactggcctgacggaaggtgatcaggctcccgaagcattgctgccgttgttcgaccgtgaagttgaaggttttggtgaagtgttccggatgttgagctttgaagagattggcacttccacgttgcaatctcgtgcggtagcgggcgtcgccaacaaaacgctgattttcgccatgccgggtagcaccaaagcgtgccgtaccgcatgggaaaatatcatcgcgccgcagctggatgcccgtacgcgtccgtgtaatttccatccacatttgaagaaataagtatgagccaactgacccatatcaacgccgctggcgaagcgcacatggtggatgtctccgccaaagcggaaaccgtgcgtgaagcgcgggcggaagcctttgtcaccatgcgcagcgagacgctggcgatgattattgatggtcgccaccacaaaggcgacgtatttgccactgcgcgtattgccggtattcaggcggcaaaacgcacctgggatctgatcccgctctgtcatccgctgatgctcagcaaagttgaagtcaatttacaggccgagccggagcacaatcgggtgcgtatagaaaccttatgccgcctgaccgggaaaaccggtgtcgaaatggaagcattaaccgcggcctccgtggcggcgctgaccatttatgacatgtgcaaagcggtgcaaaaagatatggtgattggtccggtacgtttgctggcgaagagcggcggcaagagcggtgactttaaggtggaagcggatgattaaagttctttttttcgcccaggtgcgcgagttggtgggaacagatgcaaccgaagtggctgcggatttcccaactgttgaagcgttacgccagcacatggctgcgcagagcgatcgctgggcgctggcgctggaagatggcaaattactggctgccgtcaaccagacgctggtgagttttgaccatccgctgactgacggcgacgaagtagctttcttcccgccggtaaccggaggttaagatggcagaaaccaaaattgttgttggtccgcagccgttcagcgtaggagaagagtacccgtggctggcggagcgtgacgaagacggtgcggtagtcacctttactggtaaggtgcgcaaccataacctgggcgacagcgtcaacgcattaaccctcgaacactatccggggatgactgaaaaagcactggcagaaattgttgatgaagcgcgtaaccgctggccgctggggcgcgtcactgtgattcaccgcatcggggaattatggccgggcgatgaaatcgtttttgtcggtgtcaccagtgcgcatcgcagcagtgcgtttgaagccgggcagtttattatggattatctcaaaacccgcgcaccgttctggaagcgcgaagccacgccggaaggcgaccgctgggttgaagctcgggagagcgatcagcaggcggcaaaacgctggtaattttttgttagccggataaggcaccgctgcgtccggcaatttcaccgctcagtacatacgtttacgctgcgtcgatgcacagcctcatcattttgcagtatccttaagatattccttatatcttcaggagatcgtcatggacagattcccacgttctgatagtatcgtacaaccccgggctggcttgcaaacttatatggctcaagtctatggctggatgaccgttggcttgttgctgaccgcatttgttgcctggtatgcggctaattccgcggccgtgatggagctgttgttcactaaccgtgtctttttaatcggtctgatcatcgcgcaattagcattggttattgtgttaagtgcgatgattcaaaagctgagcgcaggtgtaacgacgatgctctttatgctttatagcgcgctgacgggtcttacgctttccagtatattcattgtctataccgctgcttctatcgccagtactttcgtcgttactgccgggatgttcggcgcaatgagcctgtacggttacaccacgaagcgcgatttaagtggctttggcaatatgctgtttatggcgttaatcggcattgtgctggcaagcctggtcaacttctggttgaaaagcgaagcattgatgtgggcagttacctacatcggcgtgattgtctttgtcggattgacggcgtatgacacgcagaaactgaaaaatatgggtgagcagattgatacccgcgacacgagcaacctgcgcaaatattccattcttggcgcgttaaccttgtatctggacttcatcaacctgttcctgatgttgttgcggatcttcggcaaccgccgttaattctttttcaccatcactatcccggccatgtgtcgggatttttttcttactaaaaacgacacttaacaagtaccaggtataaaatatgccttatggacgagcggaagcgttttctgtatccataaatgcaaaagtattttgtatgcgtggttttaaatttattgatggtgaatattaatattttttctaaggataactaaaagaatggaaagttacagccaaaacagcaataaattagattttcagcacgaggccaggatattaaacggtatatggctcattaccgctttaggtttggtggcaaccgcaggactagcctggggagctaagtatatcgaaattacggcaaccaaatatgatagtccaccaatgtatgtcgccatagggttattattactttgtatgtatggcttaagtaaggatatcaacaagataaatgccgccatcgcgggcgtaatatatctgtttttactctctttggtggcgattgtcgttgcaagtttagttcctgtatatgccattatcatcgtgttcagcactgcgggcgcgatgtttttaatcagtatgctggccggtttattatttaatgttgatcctggttctcaccgttttatcattatgatgacgttgacagggttggccctggtaatcatcgtgaatgcggcattaatgagtgaacggcccatttggataataagttgcttaatgattgtgttatggagtggcattatcagccatggacgaaataagctccttgaattggcggggaaatgccatagtgaagagttgtggagtccggttcgttgcgcttttacaggtgcattaacactctattactattttatcggcttctttgggatacttgccgcgatagctataacgcttgtctggcaaaggcatacgcgtttttttcattaaccgtaaatgcacatactaaagaacttaactaaacttcacatcgccgcttcatttttcgcccgtagcttcttcgcctggctttccagcaacaggtaacagatcagcgccagcagcagtgggataaagtaatacagcacacggtaagcgagtagggcggcgataattgtacctttggaggtatgctccccagccagtagtgcgataaacaccgcttccagcacaccgatccccgccggaatatgcacgatgacgccagcaatactactaaccagtaacacgcccagtacaaagaaatagttcacgctttgaccaagtaacagccagataatcgcccccattaccatccagttaacgctggaaatcagcatctgagcgagggcgaatttccaactaggcagcaccagcttttgccctttgatggtcatatggcggtgcttcgcgaaagcgcaaaaccacaaataaaccgcgataatcatcagtaagccaatgccgagaatacgcagcgtagtttgatcgacataccagtgatccggcaactccaccacgcctgcggtaaagataatccctgccagtaaaatgtagcccagccagttggtggtaatactgaggctgaaaatccgcgtaatagtgctaccgggcaaccccagacgagagtacaaacgatagcgcataccaatgccgccgacccaggtactgagcgtcaggttgaaggcgtagcagataaagctcaccagcatcacctggcgcttcgccagtttgtgaccgcagtaaaagcgggcgagcaggtcatagcagccgtaaatcagatagctgacgaccaccagcccgaccgcactaagcagcgcaacgcgattgtagtcgcggatgaccttccagacctcttcccagtccacttttttggcgtagaccaccagcaacacaatcaccgcgataaaaaacagccaggtgaggatcttctttgctaagcgccagcgcgggtgacttttactcatcagggttttacccccgtgttttcagtttctacccgatcctgcgtttccattgtcggttgtgcgggcggatcaacctgcgccagacgtggcgtgtgtgccggaagccagccaaccagcgccgggaagtggcgtaaaaagtggaacgccagcacgcttttggtcaggttccaccaggtgcgtttgggcagcatggtttcatccacctgctgacaatctgcggcaataatgccgttcagattatcgcgcagcgtctggttaaaatgacgatcgtggatgatgacatttgcttcgagattcagactcaaactgagcggatcgagattactggaccctactgtcgcccagtgatcgtccatcaatgccactttgccgtggagcgggcggcggcggtactcaaaaacctgaacgccgcctttaaccagatagttatacagcaagcgcgcaccgactctgacaatcggcatatccggttcgccctgaatgatcagtttgatccgcaccccgcgccgtgccgctttacgcaaggcgtgtaaaaatcgatagccggggaagaagtaggcgttggcgataatcacttcccgccgcgcctgagtgagcattttcaaataatggcgttcaatatcatcgcgatgttcttcgttatcgcgccagaccagcaatacctgcgcttctcccggctggcggttctcttccgctttgtgatgacgtcgccaccagcgtcgtgccgcgctctgtccaggcaggttttccagctcaaactggagaatatcttcgacaatcggcccttcaaggcgtaccgcgtaatcctgtttagcctctggaccgtagctggacatatgctcggcggagtaattcagcccgccaataaaggctatacgcgcgtcgatcaccacaattttgcgatgcatccggcgaaacacattggtgcgcataccaaaaaggcgagggcggggatcgtagtagcggaacactacgccagctgccgtcagttcattgacaaactcatcgctgagatccgggctaccgtagccatccagcaagacttccgctttaaccccgcgttgcgctgctgccagtagtgccgcatgcagttgtttgccgacgtcatcctcaaaccagataaacgtttcaagaatgatgcgttcttgtgcctcgccaatcgccttaaacaccgcgggataatattgctcgccgttttccagcaactggatcttattgccttcgcgccagctacatttcataaatgaatctccgcacttaaaggggcatgatcagaaaggtgtcgccatgtccgcagcggcaacgcggttggcgcgctggcgctggcatttttgacgtagatcctgtccagtcgtagtagaggaaattgcaccggaaacgtgcgcgccgggcgtccgtgggcgcgggtaaaaatctcatccagtccggcctgcacttttaacggatgattagctttttgccgccagtcattgaaatcacccgccaccaataccggttcgccgtccggtagctcattcacccattcggcgagcatcgcaagctgcgcctgacggtgcgcctcacgcaggcccagatgtacgcacatcacatgaatcgcttttccggtcatcggcggcacaatgcggcagtagagcacgccgcgcttttccgcaccatcgacgctaacatcgcgattctcataatgttcaatgggataacggctcagtacggcgttgccgtgatgcccttccgggtatacggcattgcgaccgtaggcaaaatcgctccacatagtgtcggcgagaaactcgtagtggctggtatcgggccagttttccacatgcagcggatgaacttcgtgcgcgcccatcacttcctgcaggcaaacaatatcggcgctgacggtacgcacggcgtcgcgaagttccggcaaaatgaagcgtcggttaaacgcggtaaagcctttgtgaatattgatggtgagcaccttgaagctaaattgttgtgtttgatcgggcataattttcctgtctttgcctcttatctcattgaaatagtgtagtcggcgtcacaaaaaggtgcggtcttacggaattttccgtaaagttcggtactctgagtaagtagagataaattcttcaggagagaagccatgaagtggcaacaacgtgttcgtgtcgcaacgggtctaagttgctggcagattatgttgcatttactggtagtggcgctgctggtggtgggctggatgagtaagactctggttcacgtcggcgtgggattatgcgcactgtattgtgtcacggtagtgatgatgctggtgtttcagcgccaccccgagcaacgctggcgtgaggtggcagacgtgctggaagagctgaccacgacctggtattttggcgcagcgctgattgtgctgtggctgttgtcccgcgttctggaaaacaactttttgctggcaattgcagggctggcaatccttgccggcccggcggtagtgtctttgctggcgaaagataagaagttacatcaccttacgtctaaacatcgcgtacgccgctgattacatcaccttacgtctaaacatcgcgtacgccgcactccctgtcgtggccgttatcaccagtagcggccacaaactattccacacaatatccagactcgcatccttcaaataaatctgcttggtaatgtccgtaaagtggcgaatagggttaatccacgtcaggttttgcagccataccggcatgttttccaccggagaaacgtaaccggaaaggagaatggcgggcatcataaagacaaacacgccgataaacgcctgctgttgtgtactacagagactactaatcaacagaccgaatcccaccaggcttaaaccataaatcaccatcgtaaagtagaacagcgccaggcttccggcgaaggggatttgatacgcccagataccaatcgccagcacaatggtggcctggaaggtggcgacaattaacgccggtacggctttgccgatgaagatctgccaggtggtgagcgggctaaccagtagctgatcgagcgtaccttgttcacgttcgcgggcgacggaaagactagtgacgatcattacgccgatagtggtgatcatggcgatcagactcggcaccacaaaccatttgtagtcgagattcgggttataccagttgcgtaccaccagctcgctgttgttaggtttcggttttccttccagcagctcctgctgataatttttgacgatctgttgcaggtagttggcggcaatttgcgcactgttggagttacgcccgtcgaggatcaactgcaaaggcgcggtctggaaggtatccagtttgcggctgaagtcagccgggaaacgcaccagtagtaacgccttttgtgtgtcgatggttgggcggatctcctgtgggcttttcagcagcagcacatgagtaaaggcgctggcgcgggcaaaacgttgggtcagctccacgctatgctcgccgttatcttcatcgtagatggcgatggtggcgttagtcacttccagcgtggcggcgaacgggaacaggatcacctgaattagcacgggtaaaatcagaatcgcgcgggtttgcggttcgcgcagcaagctctgcaactctttgcggattaacgtccataagcgatgaaacatgctcttctccttaatccagccgacgtttggttttcagccacgtcaggccgataaacatcaccgcgctagcgatcaaaaacagcacgtttaccaccagcaccactggaatattcccggcgaggaacaggctttgcagggtgctgacgaaataacgagcgggaataatgtacgtcaccgcgcggatcaccgcgggcatactgtcgatctgaaaaataaagccggaaagcataatgctcggcagaaaagcggcgttcagggcgacctgagcggcattgaactggttgcgggtaatcgtggaaatcagcagccccatccccagggtactgagtaaaaacaggctggagataaaaaacagaatcagcaggctcccgcgatacggcacgccgagaataaacacactcaccagcatacacagcaacatcgccagcatcccgagaaagtaataagggatcagcttacacagcagcagttccgtgcgggtaatctccgtagagagcagagcctccatggtgccgcgttcccattctcgcgccaccaccaggctggtgagaatcgcgccgatgaccgtcatgataatggtcaccgcaccggggataatgaagtgctggctaatcgccgccgggttaaaccagtagcgggtttgtacatcaataagcggttcaaaagtctgcccgttgtcctccgctcgctgcatttgccagatctgccagatcccttcgacatacccctgtacaaagttagcggtattcggctcactgccgtcggtgatcacctgaatcggtgcggtggcgttggcgcgctccatctgttccgcaaaatccaccggaataaccaccagaccgcgaattttccccgcctgcattttggcgatcagttcctgacggttatcgctgatggtggcgtcgatgtaggggctaccggtcatggtgtgggtgaaatccagcgccgcttcgctacgctgttccagtaaaatcccgacccgcagcttgctggagtcgaggttaatgccgtaaccaaaaataaacagcagtagcagcgggatcactaccgcaatcagccagctactcggatcgcgaacgatctgccgcgtctctttaacgcacagcgcccgtacgcgacgccaggacaggatcgggttactcattgctatgctccttatcccagtcgtggatcaactgaataaaggcttgctccatggtgggatcgggttgctcatcgttagcgctctgtgctttcaaatcgtccggcgtgccgctggcgattaatttcccgcggtacaccaggccgatgcggtcgcaatattccgcttcatccataaagtgggtggtgaccatcaccgtgacgcctttctctaccatgctgttgatgtgcagccaaaattcacggcgggtgagggggtcaacgccggaagtcggttcgtcgagaaacagaatgtccggttcatgcatcaggctacaggccagcgccagccgctgtttaaaacctaatggcagttcatcggtggcgtgggaggcgatacttttcaggccgaacgcctcgctcatgcgggagattttttcgttctgcgcccgaccgcgtaagccatacacaccagagaaaaagcgtaaattctgttcgaccgtcaggttaccgtagaggctaaatttttgcgccatatagccgagatgctggcgcgctttaccggaactctctttcagatccatccccagcaccagcgcctggccggaagtcggcaccagcaaaccgcacatcatcttaaaggtggtgcttttacccgcgccgtttggccccagcaaaccaaaaatctccccacgtttaacggcaaagttgacgtgatcggtggcggcaaaatccccaaatttcttggtcagttctttcgcttcgatcaccgtctcgccgggtgtgccttctaccgtatgtaatattgcgcccagcgggctttcgctggttccggcaccgcccagcaaatcaataaacgcatcttcaaaacgcggcgtagtttcgttgatgttgatttccggcatcccgtcggcatggcgaatatcgtctggtgtggcctcttttttgaggatcagacgtacgcttttcccctgaatcatgccgtcgctgacctgcggcagtttcaaggcgcgttgcaacagtttgcggttgccctcgtgtggactggtcatcagaaagctgcgtccggccatggtttgtgtcagggcttttggttctccctgatacagcaactcgccttcgttcatcagtaacacgtcacggcactgctcggcttcgtcgagatagctggtactccagaggattaacatcccttcgcccgccagctcatgcaccatctgccacagttcgcgccgactgatagggtcaacgccgacgccgggttcatcgagcagcaacactttcggttcgcccaccagggtacaggccagaccgagtttttgtttcatcccaccggagagcttgcccgccaggcgtccggtaaacggcccaagagacgtaaactccagcaggcgagcaaaagtttgcttacgtgcctcgccggtgacgctgcgcaaatccgcgtacagattgaggttctccatcaccgtgagatcttcatacagaccaaatttctgcggcatataaccgagcacggcgtgcagcgcgccgtcgtttttgatcggatcaaagccaatcaccgtggcactgccgctgtcgggtttcagtaatcccgccaacatccgcatcagcgtggttttacctgcaccgtccggccccaccaaccccgtcacataaccggcgtgaatggtacaatcgagcggcgcgacggcgggcttgtccatgcccggaaagcgtttttccaggccgttcagcgtgataacggcatcattcatgtcctgcctcgtcaccgaattgtaccgtcactggcattccctggcgtaacgcatcatcggcgtcggtcaccacaatacgcaggcgatagacgaggtcggtacgcagatccggcgtttcgacggttttcggggtaaattcagcagtcgggctaacgaaaccaatctgcccgtgatacggcttgtccgggcgaccatcggtataaagcagcactttgcgccccggctgggcctggtcaagattacgttcatcaacataagcgcgcacccacaccggacgcgttagactaacggtaaacaccgtgccaccttcattgaggaccgtgcctggctccaccgcgcgcgttaacagcgtgccatcagacggggctatcaacgtactgtcctgtaaattcaactccgcctgcgccagttgcgcctgcgcctgttcgaggctggctttcgcctgagcgatgtcctgttcacggttaccggaacggtactgacgcaatttatcctgtgcacttttcagcgttgcctgcgcctggtcgcggctggagcgggcattttccaggtcatttgcgctaatagtgcggcttttccacaacccttgctggcggttatagaagttctgcgcatagtcataggcggcttgcgcctgtttcaccgctgcggcggcctgagcgatttcttcattgcgatacccggcaagcatcaggtcatactgcgcctgtgccacgctaacacccgctttcgcctgcatcagggcaatctcatacggcttgtgatccagttcgcccagcacctggcccgctttgatagcatcaccttcgtccaccgccaggctttcaacgcgccccccaacacggaaactaagatttaccgtacgaatatccacgttgccatacagcgtcaggccgttatcctggcggctttgataccaccagtagcctccggcaaccacggcggcaagtaccactaccgccaatccgatcacgacaggttttttcatcactacaaactcctttgcgataattacaaactcctttggcttaatccttgcaaaatcaggtcgatatgacaggtcaccgtctggttgatcagttcggtcttttcttcatcgaacgcggtccagccggtacgtaacagaattgtttctttgccaagacggaacgccagaatctcaccaatcaacgcatgggtatgaaggatcatgcgggtgtcattggcgtcgcagccggtccaggcggcaatcaggcgtgtcaggtggctgtgtagcggactaatcacctgttcgtgcaccaggtggtaggctgccgtgggagagagctgctcacgggagataaacttgctgaggttgacggtgtcatcctgggtgagcagcttaatcatgttcctgcaggcgcgaaggatcagttcacggatggcagcccgatcaggctgtggttgcgcgaacaagcgttcggcttcctcggcatgcggacggaactgctcgccaataaaatcggcaatccactgggcgcaggcgaggtacaaatcttctttgctaccgaagtagtaggtgatggcagcgatattctgcccggcctgggcggctatctcgcgagtggtggcgttcattccatattcaccaaactgcgccagtgcggcagcaatcagctgttttttcgcctgttcacccttgattgtcatggcaggattattcatcgcacagtccattcttaatcaaatgattgattaagattatgactccataggggagttgtccagtatggctaagaattttagcaacgccagtcacagggataatttatgcgctgcgtcacaaaaactgctacactccgctccctcatgacattgtggtttttgtcattttccttttcagtatctccctgaaaactacaccggtaacggtcggggcggttcggagtagttatgtctttcgattctttgggtttaagccctgatatcctgcgcgccgttgccgagcagggttaccgtgaacccacccctattcagcagcaggcgatccctgcggtgctggaaggccgcgacctgatggctagcgcccagaccggcaccggcaaaacagcgggctttacgctgccgctgttgcaacacctgatcactcgccagccgcacgccaaagggcgtcgtccggtacgtgcgctcattcttaccccgacccgtgaactggcggcgcagattggcgaaaacgtccgtgattacagcaaatacctgaacattcgtagcctggtggtgtttggtggtgtgagtattaacccgcagatgatgaaactgcgtggcggcgttgatgtgctggtggcaaccccgggacgtttgctggacctggaacatcagaatgcagtgaagctggatcaggttgaaatcctcgtcctcgatgaagctgaccgcatgctcgacatgggctttatccacgatatccgtcgcgtgttaacaaaactacctgcgaagcgccagaacctgttattctccgcgaccttctctgacgatattaaagccctggcggaaaaactgttgcacaacccgctggaaatcgaagtggcacgccgcaataccgcgtctgatcaggtgacccagcacgttcactttgtcgataagaaacgcaaacgcgaattgctgagccacatgattgggaaagggaactggcagcaggtgctggtgtttacccgtaccaaacacggcgctaaccatctggctgaacagctcaataaagatggcatccgtagtgcggcgatccacggcaataaaagccaaggtgcgcgtactcgtgcgctggctgattttaaaagcggcgatattcgtgtactggtggcaactgacatcgctgcgcgcggcctggatattgaagagctgccgcacgtcgtcaactatgaactgccaaacgtacctgaagattatgtccaccgtatcgggcgtaccggtcgtgcggctgctaccggtgaagcgttgagcctggtgtgtgttgatgaacacaaactgctgcgtgatatcgaaaaactgctgaaaaaagagatcccgcgcattgcgattccgggctatgagccggacccgagtatcaaagccgaaccgatccagaacggtcgccagcaacgtggcggcggcggtcgtgggcaaggtggtggtcgcggtcaacagcaaccacgccgtggggaaggtggcgcaaaatctgcaagcgcgaaacctgcagaaaaaccgtctcgccgcctcggcgatgccaaaccggcaggcgaacaacaacgtcgccgccgtccgcgtaaacctgccgctgcgcagtaatcttttatgccgggctatgcccggcatcaggctgatgaacaaacgcaaaactgcctgatgcgctacgcttatcaggcctacgtgaactctgcaatatattgaatttgcatgcttttgtaggccggataaggcgtttacgccgcatccggcatttcacaacaagcacttgtcagcaatttgagaacacgggaaaaaatttatctgttttaccgcccataagccaccgagacgttacttctctatagccaattgttcgcgcaactccattaaaaggtagcccagtcgattcttgcccttaccatgaccaccgtctccccagtaagcatcgttttccgtatgctcaaccagttttgcgggcgcggttgccagcaagagcgcacgcagttctgcatgctgttcgaatttagcgcgaagtgcttttcgcatcacctgttctttgacgctctcccagtttttacgcagaggcttagaacgatcgcgccccatgcgtgcggcgaccataggggaagaaacccgacggatctcttcgcggtatttttcatcaaggaatttttgtgcctgaaaatagtgttcactggtaggccaggttttcccgtcaaccttgatgggccaggcggcaaagttagaaaaatcaccgtagtcatcgctggtgctgtagaaatttatgatggtgtcttgcatgacgtgttggatcctttgtgctcgaacgggcattaaaccgcattatgttggtggttattgcgagccgctttccagaaacagaaaaaccattacccctgaaaaccgaaaaatgccacaatattggctgtttatacagtatttcaggttttctcatggcattaaccgccgcgcttaaagcgcaaattgccgcctggtataaggcgcttcaggaacagatccccgactttattccccgtgcgccgcagcggcagatgattgcggacgtcgccaaaacgctggccggagaagaagggcgacatctggcgattgaagcccccaccggcgttgggaaaacgctctcttatttgattcccggcatcgccattgcccgcgaagagcaaaaaacgctggtggtgagtaccgccaacgtggcattgcaggatcagatttacagcaaagatttaccgctgctgaaaaagatcattcccgatcttaaattcactgccgcttttgggcgtgggcgctacgtttgtccgcgtaatctgacggcgctcgccagtactgaacccacgcaacaggatctgctggcgtttcttgacgacgaactgacgccgaacaatcaggaagagcaaaaacgttgtgcgaagctgaagggcgatctcgatacttataaatgggatggtctgcgcgatcatactgatatcgctatagatgacgatctctggcgtcgtttaagtaccgacaaagccagctgcctcaaccgcaattgttactactatcgtgaatgcccgttttttgtcgctcgtcgggagattcaggaagcggaagtggtggtggcaaaccatgcgctggtgatggcggcgatggaaagcgaagcggtattgcctgacccgaaaaatttactgctggtgctggacgaaggccatcacctgccggatgtggcgcgggatgcgcttgagatgagcgccgaaatcaccgcgccgtggtatcggctacagctggacttgttcacgaaactggtcgctacctgcatggagcagtttcgcccgaagaccatcccaccgctggcgatccctgaacgtttgaatgcgcattgtgaagagttgtatgagcttatcgccagcttaaacaacattctcaatctctacatgcctgccgggcaggaggcagagcaccgttttgcgatgggcgaactgccagatgaagtgctggagatctgccagcggctggcaaaactcaccgagatgctgcgtggcctggcggagttatttcttaacgatttaagtgagaaaaccggcagccatgacattgtacgtctgcatcggttgattttgcagatgaaccgcgcgttggggatgttcgaggcgcaaagcaaactctggcggctggctagcctggcgcaatcttccggtgcaccggtgaccaaatgggcgacgcgggaagagcgcgaagggcagctacacctctggtttcactgcgtgggaatacgtgtcagcgatcagctggaaaggctgctgtggcgcagtattccgcacattattgtcacctccgcaaccttgcgtagcctgaacagttttagccgtttgcaggagatgagtggtctgaaagagaaagcgggcgaccgttttgtggcgctggattccccctttaaccactgcgaacagggcaaaattgttattccccggatgcgcgttgagccttccatcgacaacgaagagcagcatattgccgaaatggcggcctttttccgtaagcaggtggagagcaaaaaacatctcggtatgttggtactgtttgccagcggacgggcgatgcagcgctttctcgactatgtgacggatttacgtctgatgttgctggttcagggcgatcagccgcgttaccgtttagttgaactgcaccgcaaacgcgtcgccaacggtgagcgcagcgtgctggtgggcttacagagttttgccgaagggcttgatttgaaaggtgatctgctcagccaggtgcatatccacaaaatcgcttttccgcccatcgacagcccggtggtgatcaccgaaggggaatggctgaaaagcctcaaccgctatccgtttgaggtgcaaagcctgccgagcgccagctttaacctgattcagcaggttgggcgactgattcgaagccacggttgctggggcgaagtggttatctacgacaaacgcttgctgaccaaaaattatggcaagcgactactggatgcattaccggtatttccgatagagcaaccggaagtccctgaaggtatagttaaaaagaaagaaaaaacgaaatccccacgccgtcggcggcgttaatgatgtgagtcaggtaaggagtcgtaaatggactatcgcaaaatcattaaagagatcgggcgcgggaaaaaccacgcgcgcgatttagaccgggatactgcgcgcggtctgtatgctcatatgctcaatggtgaagtccctgaccttgagttgggcggcgtattgattgcgctgcgtatcaaaggagaaggggaagcagagatgctcggcttttacgaagccatgcaaaatcacaccatcaagctgacgccgccagcaggcaagccgatgccgattgtcatccccagttacaacggcgcgcgtaaacaggccaacctgacgccgttgttggcgattctcctgcacaaactcggttttcctgtggtggttcacggggttagcgaagatccaacccgcgtgctgactgaaaccatttttgaattgatgggtattacgccaacgttgcacggcgggcaggcgcaggcgaagctcgacgaacatcaaccggtgtttatgccagtcggcgcgttttgcccgccgctggaaaaacaactggcgatgcgctggcggatgggcgtgcgtaacagtgcacataccctggcgaaactggcgacgccatttgccgaaggtgaggcgctgcgtctttccagcgttagccatccggaatacattggacgcgtcgcgaagttctttagcgatatcggcgggcgggcgctactaatgcatggtactgaaggtgaagtgtatgctaatccgcagcgctgcccgcagatcaatctcattgaccgtgaagggatgcgggtgctgtatgaaaaacaggacactgctggtagcgagttactgccacaagcaaaagatccggaaaccacggcgcagtggattgagcgttgccttgctggcagcgaaccgattcccgaaagcctgaaaatccagatggcttgctgcctggtggctacgggtgaagcggcaactatcagcgacggcctggcgcgcgttaatcaggcattttaattcttttctcagccggatgagccatgtcatccggcttttaccccaccgcaatatgaaattcctgcatctttattgaccttcccacgcccggcgtgcagcataaaaatacaacaaacacataacataaacaggagttaaccatggaaagtggtcatcgctttgatgctcagacgctgcacagttttattcaggctgtatttcgtcagatgggtagcgaggaacaagaagcgaaattagttgccgatcatttaatcgcggcaaacctggcagggcatgatagtcatggtattggcatgatcccaagctatgtacgctcctggagtcaggggcacctgcaaattaaccatcatgccaaaaccgttaaagaggcgggggcggcggtcacgctcgatggcgatcgcgcatttggtcaggtcgcggcacatgaagcgatggcgctggggattgagaaagcgcatcagcacggtattgccgccgtggcgctacataacagccatcatatcggccgtatcggttactgggcggagcagtgtgcagcggcggggtttgtctctatccactttgttagcgtggtcggtattccaatggtcgcgccgttccacggtcgcgacagccgctttggcaccaatccgttctgtgtggttttccctcgtaaagataatttcccgctgttgcttgattacgccaccagcgccattgcatttggcaaaacccgcgtcgcctggcataaaggcgtccccgtgccgccaggttgcctgattgacgttaacggcgtgccgacgaccaatccggcggtaatgcaggagagcccgttgggtagcctgttgacctttgccgaacataaaggctacgcccttgcagcgatgtgtgaaattcttggcggggcgctttccggcggtaaaacgacgcatcaggaaacgttacaaaccagtcccgatgccattcttaactgcatgaccactatcatcatcaacccggaactcttcggcgcgccggattgtaacgcgcagaccgaagcctttgccgagtgggtgaaagccagcccgcatgatgatgataagccgattttgctaccgggcgagtgggaagtgaacacgcgtcgcgaacggcagaagcaggggattccactggatgcgggaagctggcaggccatttgtgatgcagcgcggcagattggtatgccggaagagacgttgcaggctttctgtcagcagttagccagctaaaaaaaagcccgtccagtggcggacgggcaaacaagggtaacataggatcaatgagggttagagcatatgcgtctgtcggcaaacagacagggaaatacttgtgctggacgtagcgtaaacgcctgatccgtccaacggttcggattttgtaggcctgataagacgcggtagcgtcgcatcaggcatctgttgccggatgcggcgtaaacgccttatccgtcctacgaattacttataaattaccgcagtaccgcttaatttattgttgttggtggcggaagtgatgctgtatccactggcaccggctgccgcggctttctcagccagtttcgcttccagggcatcgagggtggatgcgccatcggcagaaaccacgccgattttattcatgttctgtgcctgggatgccgttaccggttccgccgcgaacacgccaaaactcagagtactaagagccatagcagcaacaacagtattgatagttttcataattaatctctcgcaggtgatttttgtataagtgacgttgtttcgtcgatgtgatgagtatcacgtttttttacgagagataaaatcgaagagaattgaccgccttgttcaaataaattgattgatatctaacctactgataaaccatttatttgttgtacttatgaacttgttttataccgcgtggcagtcacagcagcgttaaaggcacggaatgacacgcaaaatacaaattatactcgctatgcatctcgccagttgtagttaacgtaactggctgtctttgctacctctgcgattatatcctgtataagctggtttttgtaaatctttctcctgctgacaatgaatacataagcgcacgccaggaatggcttcccgacgggcctgcgggatgggggcaccgcactcttcacattcatccaggctttcgccgcgcggaatttcaccccgagcgcgggcaatcgcatcttcaattgtactgttgatctgttcgttgacggcgtcatcgttagcccaaccggatgccatatcgacctccccatatcaatacttgtacagttaagtgtagctaatccagggacgaactcgggcagttcaagcatcagatctcgctccattcccgcagcagattatgataaagattaagcaggctcaggatctcttcactttcgccgtagcggcttttcaggctctgaatattgttgtccagttcaaacagcatggcgcgctttttatcatcgcggatcatgctctggatccacataaaacttgccactcgtacgccgcgggttacgggtgtcacgcaatgcaggctgctggagggatacaacacgagatcgcctgccgggagttttacccgatgttgtccgaaggtgtcattaacgaccagttcgccgccgtcgtagctttgtggatcgcttaaaaacagcgtggcagaaaggtcagtacgcatccagccgttttgtggatggctgcgtactgcgccatccacatggaaaccataggtttcattgttctgatagcgattaaacagcggcgtggaaagggtacgcggcaaggccgcggcaaagaataaagcatgttggttaaccgcgttcagcacctcattttgcagggcggcgtataacgtgctgcgggtgtcgacctgttgattgttcttaacttgcgcaccttgtgcgccggtggtgacgcgtccatccacccattcggcttgttccagttgttcgcgaaaacgagcgacgtcctgtgggcttaacacgccgggaatgtggtacatcatacaatttctccaaaaagtggggcctgcgccccacatctgaatcagaaatgcatattggctgtgagcaagaaggttcttggctcgcccgggtgataacggtagccgctcttgttgatactggcgacgtaatcggtatcaaacaggttgtaaacgtttagctggaagtcgagattgcgattaactcgataccccagtttggcatcggcgacccagtaaccttcggtaaacgctggcgttcccaccgcgccgtcactacctttatgcatactgccgatatagcgtgcgcccgcgccaacagagatatcgtcggttgcctgatattggctccataaggtgaaggcgtgctccggggtatacggcaggctactggaaccatcctgggcaacatctttgccgtttttgatggttgctttttgctgggtatagccgccaatcacctgccacgcgggagtgatattcccggccacggatatctcatagccttcgacgcgtttcttaccgtattggctgtaagttccgtcatcattttgctcaacttcattttcgatatcagtgcggaacagcgcggcggtgagcaacagacgtttatccagaacctgccatttggtgccaatctcgctggtgttggctttttgcggtttaaaatcggtgcggttggcactgttaccgctgccagactgcgcaagggcgaagttgttgccgcccggaggctgctgggaaacggcatagttaatatagacattgccgttttccgtcaggtgatacagcgccccggctttccagttcatcagattgccgctcttggcggtgtcgacggtggtgaccggagaaccttttgccacaccagttgggcaggtgatggcaccgcgtccgctgccgccgcaggcggtggcactgtcatattcagtatgataattatccagacggatcccgccgttcagctcaaaatcacgggtgatttgcagcgtatcaaaggcgtaaattgcgaaggtatccgtctgaccattggcgtttgcgccgttgcgcgtcaggccgccgggatgaatgctgctgtcaggatgataaatatttaccgcgggtaacgtcaccggattaacgccgtagttagtctgcgtttcacgggtaaattccacgccggtactgacatcatgaccgatagaaccggtatagaacgtgctggtcaggttggtctggttggtgagaattttattactcacatctttggtattcgccgtgcgactccaggtccagctattcacatcgctggtgggctgagtaatattgctcgccccgcccataatcgccgtcatcaggtaatcctgctttacgcggctccaacgggtagtattgcgaatggtggtgttatcgttgatgtcgtgctcaaaacgcatggtggcggtgtcggtggtgctatcgtcgtaatcggaatccgtgccgtaaaagttatgagtatcaacttttccggaatgattcagggccgccgttcccgcagatggggcagaatagcccggcaaaccgatggtcggaatgccgccgtctggcgtgttgtgctgggtgacatgcagataattaagatacaaacgattcgctgtaccaaggccaaaagcgacagaaggggcgacgccgtaacgctcatttttgactttgtcgcgtccggcatcgtgcgttttttcgcccattacattcaggcgcaccgcggtggtatcaccaatgacctgattgacgtccagcgtgccgcggcggaaccaggcgctgccaatactggcggaggcgtcaatgccggaatcattgcgcggctgcttgctgatcatattgatgctgcctgtcggtgcgctgcgcccgtagtcggtgccggacggccctttaatcacttcgacctgctcggtattgaaggtgtcgcggctgacgctgccgatatcgcgaatgccatcaatataaatactgttagaggtatcggcaccacgcatataaatggcgtcgccagtggtggagttaccgttctcacccgcaaaaaacgcacccacgccggggacgtttttgagcgcgtcggtaaggttggttgcgccctgatctttaatcacttgttcagaaattaccgtcatcgtgcgggtagtatccgctaccggacggctgaatttcggatcggcagattgttgtggcgcataaaggctaggcgtacttgcttcgacaaccagcgtgtcatccgcgttagtttgcccttcggcggcgagtgcctgagccacaggcgtgatgccaatacaaagaccggcaaagaacgtgaggctatgaaattgtctggcagggaaattgcgattgttttccattttgcaggtgactttttcttatatgttgaaattttcactgccacgagaaagcctctctgcggatgcgatgccactgttaatcccgtgatagtgctcgtgaaagtgataataattttgataagcattatcacttggagcgattttctatcacccattgcgcgaaaaagaaatacatttatttacattgagttcatatttgatgttttttgattacaaaacagacgaaaactgcatccagaggcgaatgcagttacgttggtggggttatttgtagatggttgcagtaccgaacatctggtcatttccgcctgcggaattaatgacataacctttcgcgccttgttcgcgcgctttttctgccagtttatcctccagatcgcttaggttacttgcgccagttgcgctaacggtaccggcgggccgtagctgaccgctgtccaggttactcatcggttgcgcggcataagccgtgagagagattccgctcaggacggtggcaatcagtagtgtgaggcactttttcataatgacatcctcataaatacaacgggtagtgcctgataagtgtaggtcgcctgcgcgatgcaaatgacgcaaaaaattgacagagatgtgcttattttttgaacgatatatttttacaaaataagacaaatcaatgacatgcataatgctgatttttatgatgaattgccataaaccatagccatgttaaggttttggggaatgataaacgcagccagatatttaccctgtcgcgttatgcgggtatcttacgccgctgcttaaaggagaatgctatgtccgcccagaaaccggggttgcatccgcgcaaccgtcatcacagccgctacgatctcgccacgctttgtcaggtcaatcctgaactcaggcaattcctcacgcttacacccgccggggagcaaagcgtagactttgccaatccgctggcggtgaaggcgctcaataaggcgttgctggcccatttttacgccgtagcgaactgggatatccccgacggttttctctgcccaccagtaccgggccgggcggattatattcatcaccttgccgatttactggcagaagcaagcggaacaattccagcgaatgccagcattctggatatcggcgttggtgcgaactgtatttatccgctgattggcgtacatgaatatggctggcgttttaccggtagtgaaaccagcagccaggcgttaagcagtgcgcaggcgattatcagttctaatccggggcttaaccgcgccattcgtctgcgtcggcaaaaagagagtggggcgatttttaacggcatcatccataaaaacgagcaatacgacgcgaccttgtgtaacccgccattccacgattccgccgctgcggcacgggcaggtagtgagcgtaaacgccgtaacctggggctgaacaaagacgatgcactgaactttggcggccagcaacaggagttgtggtgtgaaggcggtgaagtcacctttatcaaaaagatgattgaagagagcaaaggcttcgcgaagcaggtgatgtggtttacaagtctggtatctcgtggtgaaaacttaccgccgttgtatcgtgccctgacggacgtgggcgcggtgaaggtggttaaaaaagagatggcccaggggcaaaagcagagtcgctttattgcctggacctttatgaacgacgagcagcgccgccgttttgtcaatcgccagcgttaaagcgttggttcccccggcggtaacggttcagccggggtcgcgcccggagcaggcagcacctgataagtctgcactggcgcgcgaacgcccgccaggtcgaaatgttttttcacctggctgtcgagggcaaagcgtaccgtccactgtttgagtggcagcgtggtgaagctaacacgcagtgtaaacgcggtattgcttaagccgacaatcccggcaaaattcggttcaccaataatcagcccgcgaatttcttcgttttccattaattccgctaccgcatctttcagtgcctgattggctttatcagcatcttcatggcgatcaacatcataatttgccaccacgctaccaatgccgcggacaaagttagcaaaggtggttatgctagaccacggaatgatgtgatacgccccggtatcctgtcgtacgcccacggagcgaatgctcatccgttccactgtgccggtcaacggcccgatagtcaccaaatctccagtgttcatgccgttttcaaactgaataaataccccggtgataatatctttcaccagcgtttggctaccaaagctgatagccagacctaatgccccggcacctgccagcaatggcgcgatattgacgccgatttcgctcaacacaatcatgatggtgatggtactgataatcaccgccagcgcgttacgaaacagcgtaagcagggtacgcgtgcgggcgctgggtagcgggcggccatgaatatcgctagccagccggttttcgatcaaactggcgagcaccgtccagccaaccgcgctgaagaaaagaatgagtgcgatacggatcaggatatctacggttttctgccccgcgccgttttgcagccagttccagaaatcgaacaatccccatgcgctcaacagcaacattaccgccacgcagactgtcagaatacgcgccgttttcagcgccgcgctcagccagccattcaaccgtttttgcagctccggatagttacgctgagtatgtgggctgagagtgatggttttcgccagccagcgggaaaacataccggaaacaaacgctgcgataccaataatcgccaggctgcgcaccgttgcacccatcataaatttcaggctgttgcccggatcgaacaagctaaagaaaaacagcacgataaaataggcgcttgccagccagtgccacaccagcgcaaaggcgcggataaacaggctgaaaaaggccaggctatgctccgcgaagttgagcaaatgctgggtaatctcttttttattacgaaagatcaggtacaacgcccagacggtcatgcacagcataatgatgacgttcgccagcgcacctatctgtacattcacctgattagagataatcggcacggccacaatcaggccataacctatcaaactgcttaaccagctcaggcgacgactccagtaacgggcgctctcgtcctgaatcgtgaacgggcgcagctccgccacgtttgggcaaaaaatcaggcgtagtacggctttgaaaaattcaatgagggcaaaggcgttgagaaacaaactttgttggaaagcgatggtgcgactgcctgcattcaggttgtcgcttaatacctggccgacaaataatgtcagggccagtaacagcaggtcgataataaacgccccgataatcatcgccggaagctgcaaccagttactgcgctcacgatttttttgccgcgcccactgacccattttgcgatacagcggcagtgcgcacaggcgaatcagccagtaaaaaccaaacactaataccgctaacatactaaaatgggtcagcgcattgctgaaggtttgtggattaaacggcttatgcggggagccggtgatattgcgataaagttgcccgaagcgggcggaaagggcttcaccataatggcggctgacttcggtgaccttttgcagcacggtttgctcttcgaccagcgtcggcggcactatttttggtaccggttcagcagggggcgtagcggcaacggtgcgcaactggtcgatcaactctttacggctggtgtcattatccagcacatccgccagtgcgccataggccgcttttttttgttcgatatccggttccggggccggttcagtcgtactgtccgttgtcgttgtggttgtaacgccgggtatggataccgcgtgggcaggtgcgcccagcaggcagaagaggatgaacaggatccaccgcatgactcctccagtgagaaaatagagcaaaaagataagtatagatgctggaggaggggcgattttaaatgagaggaatctggtgtgcctccctttcgggtgaaagggaggaagggatattaagcaggttgctgacaacgtgcgggcttttttgccggatgcggcgtgaacgccttatccgtcctacaagttcatgcaattttaataagttgccagatatcctgtaggcctgataagcgtagcgcatcaggcaatgtgtcttattaagagacgtgctgcaaaaattcctgcaagcgctggctcggcgggttcttgatcaacacctgcggattgccatcttccgcaatccggcctttgtcgataaagatcagccggctagctactttctcggcaaaaccgatttcgtgggtcacgatcaccatcgtcatcccttcttcagccagatcctgcataaccttcagcacttcatggcgcagttccgggtcaagagcggaagtcggttcatcaaacagcatcattttcggcttcaccgccagcgcgcgggcaatcgccacacgctgctgttgaccaccagaaagttcggaagggtagtgatgtgcacgttctgccagaccgactttcgccagcagctcacgtgccagtttttccgcctcttctttgttcgcgccacgcacgcgtagcgggccaaacatgacgttttccagcgctgtcagatgcgggaagaggtaaaactgctggaacaccatacctgcttcctggcgaatcaggcgctcgtcaactttcggatcgttaaccttcaggccatcgacaatcagatcgccggaggtgatttcttccagtttgttgatgcagcgcagcagggtgcttttaccggaaccggacggcccgataatcaccacgacttcgccctgggcaatgttcaaatcgatattgtgcagcacctgggttgggccaaagtgcttggagacgtttttaaattcaatcacaggattttcatccttctttccagacgacgcagaataaagctcagcaccagggtaataatcagatagaacaccgccacggcgctccagatctcaagggcgcggaagttaccggcaataatttcttgcccctgacgggtcagttccgccacgccgatcacaataaacaggctggtgtctttaatgctgatgatccactggttacccagcggcggcagcatacgacgcagtgccagcggtaaaatgacgtagcgaatggtttcccaacgactaagaccgagcgccagtcctgcttcacgaaaacctttgtggatagacagcaccgcaccacgcgtgatttccgcaatatacgcgccggagttgatcatgatggtgaccaccgccgcagtaaatgggtcgatgcgtaagtcgttaaacgccatcggcagggcgaaataaataaacatcacctggacgacgataggtgtgccgcggatcacttcaataaagaccagcgcgacgtggttggctatccaacctccgaaggtgcgtgcaaaacctgccagcaatccgattaccagaccgcctgccagaccgaggacgctaatccacagggtcattttggcaccttcaatcagaagcggaatggcaggccagatggcactccagtcaaactgcatatgttgttcctgttaccgtggtgtaaataatcaaattcagggtaattaatggccccggagcgggtttgcgcccctcaccctaatcctctccccataggggagagggaactgccagtgcgttttacaggtgtagcgttattatttcggttcagtaccgaaccattttttgtagatttcgttgtaagttccgttctcgcgcagggttttcaacgcgccgttgactttgtcacgcagctcgtcgctacctttcgggaacgcaataccgtattgctgcgcttccagagagtcacctaccgctttgaactgaccgttaccggcggttttgatgaagtacagaatgtttggcgtatcgtgcagaacggcgtctgcgcggttggtgcccagttccatataggcgttatcgatgttcgggaactgacgcagatctttagttttgatgtttgctttcgcgtaatcaacggagccagtaccgctcttcacagcaaccactttcccgtcgagatctttcacgcttttcacatcgttattgttagctttcaccatcactaacaggccgcttttgtagtagccgtcagagaaatcgatcgcttttttacgctcgtcggtgatggtaatgcccgccagcgccagatcgacgtttttggtttgcagtgccggaatgatcccactgaaatccatcggcttcagttcgtaatccagcttcagctctttagcgatggcagcccacagatcaacgtcaaagcccacatatttatcgccctgtttaaattcaaacggaacgaaggcggtatccgtcgcgacaactaattttttatccgcggcatgagaagaaaccgcaaaagccagggtcagtgcagccagactaacttttaatacagacttcatagcatttccttttttctatccacgggacgatcccctgcgtgacattcacatatatgaaaaaatcgtgccagttttgcaactccttgatttttcgagatgcggcaaaaacgtgatgcacgatttatagggcaataccctgaagatgcaccattctggggcaccaatctggtgcgctaaaattgtgcactcaacacagtgattatttagcgtaaaacctgatgaaaaaacaatctttatgtaacgattgtgtgatgatgtggatacaaaaaatttacttaatcagctggagatagcagatggatgcactaaataagtgcgttgaggtgggctgcaaaacaaaacggcctcctgtcaggaagccgcttttatcgggtactaaagttctgcaccatcagcgatggatttattcgatgttagactcgataaaccacaggaatttatccaggtcgcgagacgcggcggtcaggatatctgcggtgtcgtcatctttcgcttcgccaatcgctttgcgtacgtcattagcgacgattgcgtaacggtcagccagttctttcaggtgatcctgaacgttgtggatgtccagcgggtaacttttcagcggggttttgctgttgataacttgagtggtccccagagctacaccgcccagctgcactgcacgttctgccatggtatccagatgatcgatcagtgcggtgcggaagccatccagcatttcatgtacggcaatgaagttagcgccgcgcatgttccagtgcgcttgtttggtaatcaaagaaagatcaataaactggataacctggcgattcagcaactctactgttgcttttttctcgctgtcggagacatcgttgcgggtataaagcagattggtcgctttacttttaactaatttagcggtactcataatttcatatcctcttgatgttatgtcccagtaattaacgagattaagtatagcaccggctatgtgttccgctattctggctgttcctatcacactaatagtggtaacaagcgtgaaaaacaaaactaataaagattcaatgagttagatatattgataagaacaattcttatttatctgctcgccaggaattttcggaataaatatgcttttgcataattcgatatataaagacggtgtagaggaaaagtagcgagaaattctgcatggttatgcataaccatgcagaaatgtaaatttaattaatgtctaattcttttattttgctctctttgcgtactgtcagcgtagaccccatactagcggcgatgatagcgccgagcgccagtagctgtatgggtgtcagtgtttctccgaggaaaatcatcccggaaacggcagccagcgccggttccatgctcatcagcgtaccaaatgtccgtgttggcaaacgggtgagggcaatcatttccaggctataaggcagagcggtgctgagaatagcgacagccagacccaatggaataacgctccagtgccagagtgcttcaccagcctgaagcgctccaattggcacgaaaattaacgctgcaatcaagctaccaattgccaccgtcgcagggccatgttccgctcctgcgcgttgcccacttaaaatgtaaatagcccaacaagccccggcccccagtgccagcgcacagccggttaaatcgacatgggaaacgtcttgccccagcggtagcaggaaccacagaccaagaaccgccagcacaacccagacgaaatctaccgggcgacgagaagagaacagcgccaccgccagtggtccggtgaactccagcgccaccgcaatacccagcggtactgtctgaatagaaagataaaaaagataattcatcccacccaggctaacgccgtaaaacaacagcggtaaccgttgctctttggcaaagcgcagtcgccatggcttaaagaacgcgatgaggatcagcgttcctaatgccagacgcagcgcagtgacacccggtgcgcccaccagaggaaaaagactcttagctaagctggctccaccctgaatagacgccatggcaacgagcaatatgactattggtaaccagaccggcattttacgtaaactaccaggcatcctttctcccacaaatatctagacttaagtaaagcgtggagtgtactggatatacccaatgctggttgagcatttgttgaaaaaattttcccccgttttgactaaaatgcgccaggattgatggaatcattagtctggtgattaggaataatctggatgaatgacagggaaaacatgcgtaatacttacgcagttctctgaaaaagtgatttaaatttagatggatagcggtgtatggaaacgttctgttacatgaaatggcccgttagacatcacaaatcgcgaagagtttcccattaatttttgatatatttaaaacttaggacttatttgaatcacatttgaggtggttatgaaaaaaattgcatgtcttagtgcactggccgcagttctggctttcaccgcaggtacttccgtagctgcgacttctactgtaactggcggttacgcacagagcgacgctcagggccaaatgaacaaaatgggcggtttcaacctgaaataccgctatgaagaagacaacagcccgctgggtgtgatcggttctttcacttacaccgagaaaagccgtactgcaagctctggtgactacaacaaaaaccagtactacggcatcactgctggtccggcttaccgcattaacgactgggcaagcatctacggtgtagtgggtgtgggttatggtaaattccagaccactgaatacccgacctacaaacacgacaccagcgactacggtttctcctacggtgcgggtctgcagttcaacccgatggaaaacgttgctctggacttctcttacgagcagagccgtattcgtagcgttgacgtaggcacctggattgccggtgttggttaccgcttctaatcactttggtgatataaaaaatccgcctctcggggcggatttttgtttttaaggtttcgggtcgaaaatatcggttccgagatggttgtaatccaccttctgtaactggaagttggtgatgtatatcggcccggctttcttctcagatataaacgggtatttgatgttaatttccttcgctttaatccccgtccactgggagaaaaagcctaagaagtcattggcactgcggcgggctttaatcacacgatgcgctttatcgtcgctggaaatgaccataaaaggcacctggaaattttgctgatatttatcatcatgggcaaggtattgcacgtctttaccgcgctctttaaaggccagaccgtggtcagaaaagtaaaccaggctgaagctgctgccgctgttgcgtaactgatcgtacagcttgcgcagtaaatcgtccgtttgcgtcatggtatagagatagcagctcgtttctttgctttgcacaaaggtttcgtattttccttgtgtcctgtcgcaggcctgcggatgactgcccatcagatgtagaacaatcagctgcggttggctgtgctcttgcgccagcacttgagcggtcatatccagtaacgcttcgtctttggtgtttttatctgcttcaaaattaccttctttcaggaagtacacttcatctgctcgtttggcgatgctggcgatagcggtatcgtattcgccgatttgaccctggttggaaaaccaccaggtctggaagcccgcgcgatttgccagggtgacaaagttatcctgaaactgtggtttgccatcgacaacgcgattgagcgttaagccaaggcttttctgcgtggagccactggcggcaatgtagtcagcaaatatcaaaccgttaacgctgctggcaaacggggtattgtcccagtgaccgccaaaggcaccgagggcatcgcgacgcgcgctttcaccgatcaccaccacataggtctgatacttcggcttaacggcagtgaccgtccaggtatctttcattccggaaagttttgccatccgttcttgctcttcaatcacctcgttattattgacgatgacatccttagcaaaacgaaataccggatagccagtatctttcagtttaaatacgccaccccaggccaggttttgcacgggagcaacaaaaaatgtcgccacactgaataccagacacaggctgtcgaaggtattccagcgcgctttttcattctctttttttcgcctgattgctattacgccgagcgcaaaaataaataagccgaccaggtagctgtaccacggaaaaatcgtcaggatttcggtgctctcttccatattggtggagtgcaatgccagcaatgtattgaaattaggcgcgccgtaggcctgagcaaaagggaaataacaagccgccaccaggctactgacaccgaccagaactttttgtacgcgaggcaatgttcgccatagcaaaagcaaaatagccgtaaacgcagcggtgtagagcaaactgaaggggtaacctaagccgaggttaattaataggctctgtaaaaagtagaacgcagtccacgggctaaatacccggctacgggtaacaaggctttctttgagggttaaattcatatgccactatcgtaacaaacgccatgtgcttaccctggcgtcaagggtcaatacctgcaagagtgcgtgaagagtggaaaggggtccgcatccgcgagccgcaatatacgcagggctgcaagaagatagagcgagccgccgtagtggtcaactactgacgaacaaatcttttgcgaaggggattgcaaatccgacaaaaagtggggtttttcagaccaaaacgcgttatgcctgcatgaaagcaggagtgaagcggcgtaccgcgacgccgctatttatcggaaggtttatcttgctgcggtttgttgttgaccatatcgcacaacatagagagcagcattaaccgtactttaaagggagaatgactaaacacgcgcatacacctcttgaactcattcataagacctcctgacttgctaatcccgtcgatccttgagggatgattgcattacatacagatatagcacaggctatattatatagctattgctaaaacgttaattttttgtaccttcgcaactctggtttacaatgtgcgcacgaaatgagaacgctatgtatgcgtcaccataatgaggaagcacaatgagtcgtcgcgcaggtacgccaacagcaaaaaaagtgacgcagttagtgaacgtggaagagcacgttgaagggttccgccaggtcagagaggcgcatcggcgcgagcttattgatgattacgttgagctgatttctgacttgatcagggaagtgggggaagctcgtcaggtggacatggctgctcgtctgggagttagccaaccgacggtggctaaaatgcttaagcggctggcaaccatggggctgattgaaatgatcccctggcgtggcgtgtttttaacggcagaaggagagaagctggcgcaggaaagccgcgagcgacatcagatagtcgaaaatttcttgttggtgttgggcgtcagtccggaaatcgcccgtcgcgacgcggaaggcatggagcaccatgttagtgaagagacgctcgacgcttttcgtttgtttacccagaaacacggtgccaaatgagcctgccttttttacgcacgctgcaaggcgatcgtttttttcagttattaattcttgttggtatcggattaagctttttcgtgccctttgcaccgaaatcctggcctgctgctatcgactggcacaccatcatcaccttaagcggcctgatgctgctgaccaaaggtgtggagttaagcggttattttgatgtgctggggcgcaaaatggtgcgccgctttgctacggagcgtcggctggcgatgtttatggtgctggcggcggcgctgctttctacctttctgaccaacgatgtcgcgctgtttattgttgttccgctgactatcacgctaaaaagactgtgtgagatcccggttaatcggctgattatttttgaggcgctggcagtcaacgctggtagcctactgacgccaattggcaacccgcaaaatattcttatctggggacgttctggtcttagctttgccggatttattgcccaaatggcaccgctggctggcgcaatgatgctgacgctcctgctcctgtgctggtgttgtttccctggaaaggcgatgcaataccatacgggggtgcaaacaccggagtggaaaccgcggctggtgtggagttgtctggggctgtatatcgtctttctgacggcgctggagttcaaacaagagctgtggggactggtgattgtggcggcaggctttgcgctgctggcacgtcgcgtggtgctcagtgtggactggacgctgctgctggtgtttatggcgatgtttatcgacgtccatttactgacccagcttccagcgttgcaaggcgtgttgggtaacgtgagtcatctatctgaacccgggttatggttaacggcaatcggtttaagccaggtgatcagtaacgtgccgagtaccatattgttgctgaactatgtgccgccgtctttattactggtatgggcggtaaacgtaggtggctttgggttattacccggaagcctggcaaatttgattgcgctacgtatggcgaacgatcgccgcatctggtggcgtttccatctctatagtataccgatgctgttgtgggcggcgttggtgggatatgttttgttagttatactcccggccaactaaggtctggcaaataaaaaaggcggattatgagtccgccttttgctttaagttttgaagattaattcagacgaaccggcatcccggagcggtttttaatcgcttcatcaagaacaacctggtcaacatctggctgaccggtcactgtctgcacgctcttcgtcagggtaattggcacaatttcctgaccttcaaactgggcttcggtggtagacagcgggttatggacttcaatataacggctgccgtctggctcggtggtcgcttttaccggctcatcaataaactgtacgcgggtaccgaccggtactttctcgaacaggaatttgatgtcttcgttacgcagacgcacacaaccatgacttacacgcaggccgataccgaagttggcgttggtgccatggatagcatacaggcgaccgatatagagtgcatacagccccatcgggttatccggacctgccggaacgacagccggaagcggttcgcccgcagcgcggtactctgcgtgcattttggcggtcggcgtccaggtcgggcctgcttttttacgctcaactttggtggtccagttgataggcgtatctttgcctaactgaccaatgccgatcggcagcacgataacggtgttggtccctttcggatagtaataaagacgcatctcagcactgttaatgacgatgccttcatgaacggtatccggcaggatcagctgctgcggaatgttcagtacagtaccgcctttcggcaggaaggtatccacacccgggttcgcttccatcatattggaaagccccatctggtactcggcggcaaaatactccagcggctgagtgttaccttcaggaatggtgatcacctgattctgaccaaccaggcgactcccgtcggttggcagaggataagttaccgcagaggcggtactgcaaaagccgacaacagcgaaggccgctgcgaataatgttttcaatttcatattcatgttaagcgagattttgtgcctggcaggccattgggttgagaatattagagtattggaagcgcattataagttcattccagctcacagtgaaatcagatgtgtacgaaatcacattttttgcctttggcttgagtgtagaccttaagcgaggagcaggatcttctttcagacttatggcataatgcgcggtttgtcatatctcttttcaggatacgcctgtgttagtttccagtaacgtcaccatgcagttcggcagtaagccgttgtttgaaaacatttccgtcaaatttggcggcggcaaccgttacggcctgattggcgcgaacggtagtggtaaatccacctttatgaagatcctcggcggcgaccttgagccgacgctgggtaacgtttccctcgatcccaacgagcgcattggtaaactgcgtcaggatcagtttgcctttgaagagttcactgtgctggatacggtgatcatggggcataaagagttgtgggaagtgaagcaggagcgcgaccgcatctatgctttgccggaaatgagtgaagaagacggctataaagtggccgatctggaagttaaatacggcgaaatggacggttactctgcggaagctcgcgccggtgaactgttgcttggcgtgggaattccagtggaacagcactacggcccgatgagtgaagttgctcctggctggaagctgcgtgtgcttctggcgcaggcgctgtttgctgatccggatattctcctgctcgacgaaccgaccaacaacctcgacatcgacaccattcgctggctggaacaggtgctgaacgagcgtgacagcaccatgatcatcatcagccacgaccgtcacttccttaacatggtctgtacccacatggcggatctggattacggcgagctgcgcgtttatccgggtaactacgatgagtacatgacggcggcgacccaggcgcgtgaacgtctgctggccgataacgccaagaagaaagcgcagattgctgagttgcaatctttcgttagccgctttagcgccaacgccagcaaatctcgccaggcaactagccgcgcgcgccagattgataaaatcaaactggaagaggtgaaagcctccagccgtcagaacccgttcatccgttttgaacaggataagaaactgttccgtaacgcgctggaagtggaaggtctgaccaaagggtttgataacggtccgctgtttaaaaatctcaacctgctgctggaagtgggtgaaaaactggcggtactgggtaccaacggcgtcggtaaaagtacgctgctgaaaacgctggtgggcgatctgcaaccggacagcggcaccgtaaaatggtctgagaacgcgcgcattggttactatgctcaggaccacgaatatgagtttgaaaatgatctgaccgtgttcgaatggatgagccagtggaagcaggaaggcgatgacgagcaggcggtacgcagtattctcggtcgtttgctgttcagccaggacgacatcaaaaagccagctaaagtgctttccggtggggaaaaagggcggatgctgtttggtaagttaatgatgcagaagccgaacattctgatcatggacgaaccgaccaaccacctggatatggaatccattgagagcctgaacatggcactggaactgtatcagggcacgctgatctttgttagtcacgaccgtgagttcgtaagctccctggcgacccgcattctggaaatcaccccggaacgcgtgatcgactttagcggtaattacgaagattacctgcgtagtaaagggatcgagtaagtgattatccgtcaccccgatactgtcggggtgacggcggctgatgacaaatgcaaaatagcctgatgcgctacgcttatcaggcctacgcagtacctgcaatatattgaatctgcaggactttgtaggccggataaggcgttaacgccgcatcaggcattaacaaagcgcatttgtcagcaatctgagtaacgtcgaatcgattttcttaatcccacatcaattcacttccattaattctcaaacatccatgcccaacgctcgcttaccgtgaatgttgaggtcggcaagcgtaaagcgtccttcccagtttgtttcatagtcctcgcgcgggaagtcgcccgggcttgcgcctttttccagtgcggccttcaccttgtgcgcgtaggcaagatttttctcgcacatcggtgccgcaggaatgtacatcacgttgccccaaccttgttgattttcaacgggggcaacggaatggatgacgtcgcagtgccaccagacggagtctccggcttcgagttttggaatgctggttaacgcctcaatcaacagtggatgccattgctcacttaccggcaatactcttccgggcgctacgccgcacagttcatcctccggcacatcatcaagcagcggacgtaacagtacgtacgccatagcttcaggaatgggcacgacgtgcagcagcccctgaccaggcagcatatcagagagcgctgtccagccctggaatgtccgaaacacggaacatttggtggtgttgtccaccgtgtactcttcaacttccgtacgatgtgccgcatgccagggatcatattgcgccagattgccattaaagacgttggcgaaaacgcgctgatacgctggaagcagccagcgttccagtgccccggagtcggtatgcgctccaagacctttggaggtcgttccgggcggacggcggcggatacggtcagggtagatgacgctcacatccgggttaaaccattgctttccatcactttcaaatgtccacagacgattgagaaagctctgcgcattcgccatttcttcactctggcgggcctgcatttgcgcctggctccagtagatggggtaaatctcgggacgactagcgctgagcgtcccgaagaaattatcgccggggcctttgtagacctcgtcaaagcggttgcggtccagatagtccagcatgctctgatcccagcctagcgcttgttcgcgggggaaatggccttttatcaccgcacaaccgcgacgtttaatctgttcgcgctgctctgcagtaacatgacctgctttgatatcggcataagacagcaccggccagacggcatcgccctgtgctttgagtgcgttgatttcagccactcgcgtggcaatgtcatcgcttagctgattaaagatctgctggacgtcgccaagctgcgcccgcagcgcgtgcttcatctgacggatagctgctttgtgatcggcaggcaatgtgtcgctggtaaaagtagaagccataaccacctctcattaactttcattcgaaaccattctgatttgcatgtgacaatataagttataaataagttaatgcaagtttaatgatttgatgtgatgtacaggatgtaaaaagaagggaaaaccggagcgcacggctccggtagagaggtcagctgttaaaaggggatgtgttatccagcaccgcctgaatcacattcagcgcgccttcatgattattatcatcggtagcgtaacgggcgatttgtttaatgttttccgcagcattgcccatcgcaaaggaataacgcgccattttcagcatctccgcatcgttaccgctgtcgccaatcgctaccacattttgcggactcagatcccagcgtttcagtaaccggctaataccgtttgctttatgtagaccgggaataatcaggtcgataaagccaaaaccactggtaacgggtttcataatgccatcgagcgctacgtgcagtttgtcgatcactaacgggatttgttcatccggcaggttgaggctaaacttgaacagtacgtcgtcaatctcctgataatcttttacaggtttcaggcgatggtagtgttttgccatcagtgcgacaaatgcttcgggggcattttcgctgacatatgcactttgcagaccgcaggcgacaaaattgagttgcttatcttttagcaactcgccaataacaatccggctttcatgtcgggtcagttcgccgtggaacaactgcttgccatgttcgtaaaccagtgcgccgttttccgcgacaaaagagatctcatcctttagctcaggaaagaaactaataagctggtaatactgattaccgctggcaacaacgaacttaatgccgcgctttttcagttcctgatattgcgccataaaacgtggttggttgtacgttttggcgtcgttaagaaaagtaccgtccatgtctgtgacgataacttttacgctcataggtgtgctcctggctcgaaaatgaaaccgtaacagtgtaataacaatgtgacgcagagcacaaattatatttcgaatgaaagtaaggatgaaattgatgatgtgaatgatttagcccggcgacgacgccgccgggccgaggagattacagcatatgttcagtacgggcgatgatatcgtcctgagcgtctggagagagcgcggtgaagaacgcggaatagcccgcgacacgcactaccagatcgcgatactgatcgggatgttttttcgcatccagcagcgtttcgcgggaaacgatgttgtactgaatatgccagcctttatgcacttcaaagaaggtacgcagcaggatcatcagtttctgcttgtcagattcgttctccagcgttgccggattcagtttctggttgagcaacacgccgccgagaatcgctgccgtaggcagtttacccacactgccaatgaccgcagtagggccaagatggtcagtaccggaggccgggcttgcgccttctgccagcggggtgtgggctttacgcccgtccggtgttgccatagtctgcgcgccaaacggtacgttagcggagatactactcgtacccgcgtaatagttgccgccaaccggaccacgaccgtagcgcggattatggtactgtttcagttcgtcgatataggtctgataagcgcgagccagcagcgtatcgacagtatcatcgtcgttgccgtacttcggcgcaccgttaatcagccgctgacgcagctgctcgtgagtcaggccgtcgaagtcatctgccagtgcggcagcaagctgttgctgaccaatcgcaccttgttcaaacaccagtttcttcactgccgccaggctgttgccgaggttggcaatgccgacctgcaggccagaaacccagtcatatttcgcgccgccttgcttgatacttttcgctcgctcaatacagtcatccaccagcgcgctgcagagaatatcgtgcacgttctcttccagcatggtgtcgacgacatattcgatttcgatacttttgcgggtgtagtaacggatttgcgtatcccacgcgtccatcacttcatcgaagttgttgaagttacctgcgctcaacgctttttcttgtggcaggaacactttgccgctggtggcatcatgcccgccttccagcgccgccagcatcacgcgggcgaagttgataaagctcatgccggtacagcgatagccccatttgccaccgacggcggtttctatacaaccaatcgctgcgtagtcataagcgtcctgcggttcaataccgagtttaataaattccgggatcacgatttcgtcgttgttgaacgccggcatcccgaagccgcaacggatcacctgtacgcaggcgtcgaggaaatcgttgctcattcctgcatggtaacgcacgctgaggttaggctgagtggaacgcaggcgaccgcaggattcgaggatcgcgtaagagagtggattcaccgcgtccattggttgaccatcaaccagattttgcccgccaatagtgacgttctgatacagcggacttcccgcagaggctttactgtgactgccggagcggatcttgttcacttccagcagtttcagccagcagctatgcagcatctcgatggcgtgttcgcgatccagcgtctggttgagttcaacgtcgcggcgatagtacgggtagagatactggtccatacgaccaaagcttacactgtgaccgttagattcgatctgcaaaatcaactggatgaagtaacacagttgcagcgcctgccagaaagtctgcggcggctggtgggcgataagatcgcagttttctgccatcgccagcagttcatcgcgacggctttcgcgggtttcggtcgcggccatttcacgcgccagggcagcgaaacgttcaatgtgttcactgactgccaccagcacgatatcaatcgctttcaggaattgctcaccgtgtaaatcttccagcaccgtcaggttgatgcggctgcgacgttccgctacttcctcgcgcagaccatcaagccctttttccagcagcagcgggaaattcaccgccaggtgcgcatcgccggaggtcatattgccttccgctttaatgattccggtcgccagcagacctttttgctcatcggtaaacatgccgtagcagcgatcctgtacggtctgaccgcgccaccacgggcacacttcatgcagaacgcgtttgttctcttcgctcaccgcaaagccagcaccgggacgatctgccagatcatcaatctctttttcgatccagctgacagtatattccgggaagatcggcgcggcgcgaacttcgcttgcctggttgccaatgatcaactcatcgtgtttgatccagatggtgcgattcgccaggtgatgcgccagtgccagcgcgcgacgtaccgggatcggcttatcgagatgttgttgatacatctcggtatagtgctgcgcgcgctcggtacagactggcggtttcacaatatgcaccagcgcatttttgtgcgctttaatgcggtcgctgagcgtgtccagtttcagtgtggtcatggttgttatcctcgtaaggtcgcggttaaccctttctggcaggcatactgctgggcaaagtcgagcagttctggcgcatcaagcggtttttccggggcgtcatagggcagattaagtaagtgatatttgttgatgcccagcgtgtggtagggcagaaaatgaatttcgccaacgtgcagctcgtcggcggcaaaatcggtaatggcttttacagaggtttcgtcggcattaaagccctgaatcagcggcacgcggataatgatttttttgcccgctgcggcgagttttttcaggttatccagcactctggcggcgttaccgtcggtccactgtttaaacggcgcgtcggcaacgtgttttaaatcggcaagaaacagatcgatatagggcagagaaggggcgatatatttccacggcacatgcagacaggtttctaccgcagtatgaatgcctgcctcgtggctggcttgcagtagcgccatcgccatttccggctgcataaagggctcaccaccgctaagcgttaaaccgccgccgctgcgatcgtaaaacggtttatcgcgcagaacggtcgtcatgatctcctcaacgcttttcacttcaccacacacggttaatgcctgtgtcggacagcagtcggttaacgccgtcagatgctccggggttaacttttcccgatgaataagcaaaccattcagcgcgcgctcaatcacttccggcgcggccttagcgcacagctcgcagccttccagacacagtcgtgcgtcatacagcagatcctgcgtgcgggcgcggctttccgggttctgacaccagcggcagcccaggctacagcctttaagaaatacgaccgtgcggataccggggccatcatgggtgctgtagcgctgaatattgaaaatcatagttgcctctctatttcgttcaagcattaaaatactttcgaatgaaagttagattgatgtgcgtcaactgttcagagagttttcccgtgatagtctacattcagacaaaaagtacattttgaggatggttatggaactgtatctggatactagtgacgttgttgcggtgaaggcgctgagtcgtatttttccgctggcgggtgtgaccactaacccaagcattatcgccgcgggtaaaaaaccgctggatgttgtgcttccgcaacttcatgaagcgatgggcggtcaggggcgtctgtttgcccaggtaatggctaccactgccgaagggatggttaatgacgcgcttaagctgcgttctattattgcggatatcgtggtgaaagttccggtgaccgccgaggggctggcagctattaagatgttaaaagcggaagggattccgacgctgggaaccgcggtatatggcgcagcacaagggctgctgagcgcgctggcaggtgcggaatatgttgcgccttacgttaatcgtattgatgctcagggcggtagcggcattcagactgtgaccgacttacaccagttattgaaaatgcatgcgccgcaggcgaaagtgctggcagcgagtttcaaaaccccgcgtcaggcgctggactgcttactggcaggatgtgaaagtattactctgccactggatgtggcacaacagatgattagctatccggcggttgatgccgctgtggcgaagtttgagcaggactggcagggagcgtttggcagaacgagcatttaaccggacgttctgcatcctcataaattgctgatgacgtggcggagtgccgcgtcttatcaggcctggaggtggcaattactgcccacacacctcacaccccggattacgcatcagtttcatttcgcgaaactgacaggtcatcgcatcgtacatgacgattttcccgctggccggtttgccataacctgccagcattttgatcgcttccattgcctgcaagctaccaattacgccgatcaacggtgccattacgcctgcttccacgcaggttaatgcattttcaccaaacaaacggctaaggcagcgatagcacggttcaccgtcctgataagtaaagacggtgatttgaccttccatacgaattgccgcgccggaaaccagcggtaccttcgcggcaaaacagcctgcgttcagttgattacgtaccgcaacgttatccgtacagtcgagcaccagatcgtgttcagcaatcaatgctgcaagttctgcgtcatccagcagtgcattgactggcgtaatcgcgatatgtgggttgatccgcgtcagggcgtcacgggcggattccaccttcggttgcccgaccgtggcatcactgtgcagtgtctggcgttgcagattgctgaggctaaccgtgtcgaagtcgagcagcgtcaggttaccgacaccggcgcttgccagatactggctggctgcacagccgaggccgcccaggcccactatcagcacgcgagaatctttcagcgcctcctggccgtcaaaatcaaagccgcgcagaatgatttgccggttgtagcgcagcatctcctgatcgctgagttccgccattacaggcctccgaacaacgcgttaaacggttctacttccacccattcgcccacttccacattgccgcgatcgcgttccagcacgataaagcagttgccgaggctaaaggagctaaatatatgactaccctgatgtccggtggtcgtcacttccagttcgccatcggcgttgcgttgcagcacgccgcgctggaaatcaagacgtcctggcgtttttttcaggcgggacgctgtgcgtacgcgctggcgcgcgggcaggccgctggcggtgttaccgcttagttttgccagcaaaggctgtaccagttgatagaaggtcagcgtcgcactaaccgggttgcccggcaggccgcagaaccagctattgctgagtttaccgaacgcgaacggtttacctggtttaatcgccagcttccagaaggcgatctcccccagctcttcaagaatcgttttggtgtaatccgcctcacccacactaacaccgccggaactgatcaccacatccgcctggctgtcggcttcaataaatgcggcgcgcagggcatggggatcgtcgcggataatccctaagttaattacctcgcatcccaactgttctaacatcaggtgtacggcgagacggttggtatcgtagatttggccgtcgcccagcggctgaccgggcaactggagttcatcaccggtagaaaaaagcgctacacgcactttacgaatcaccggaacttcggcaatccccagactagcaattactggcagctctgcggtagtcaggcgagttcccgccgggaaaacaaccgcacctgcagagatatcttcaccgcgacggcgaatattttgcccgctacgcacttcagcagtaaaacgcacgccattgtccatttgttcagtctgctcctgcatcaccaccgcttcgcagccttccggcaccggcgcaccggtcataatacgaatgcaggtacccgcaggccattcaccatggtatggctgaccggcaaaggatttaccggcaacgggcagcggttgcccggaggcaatatcggctaaacgcaccgcgtagccgtccattgcggagttatcaaaccccggaacatcaagcgggctaacgacatcgctcgccagaatacgaccaaaacactgtaccagtggcagcgtttcctgggcggtcagtggggtgacgcgagaaagcatctcattaagcgcggtgtcgaggctcatcaatccggtggtaaattccatgaaaacactcctgcggaggcaaaatcgaatttgcctattatgtcagaaaaacgccacagactgtatgccacctcgggcgtagcgctgggtcctgcctttacatgccatatccatctttctatattcaaaaattgaatgagtaattcataaaaattctgatatttatagcaaaagtggcgaaccacccttaatggacgaatactatgggcaaagcagtcattgcaattcatggtggcgcaggtgcaattagccgcgcgcagatgagtctgcaacaggaattacgctacatcgaggcgttgtctgccattgttgaaaccgggcagaaaatgctggaagcgggcgaaagtgcgctggatgtggtgacggaagcggtgcgtctgctggaagagtgtccactgtttaacgccggaattggcgctgtctttacgcgtgatgaaacccatgaactggacgcctgtgtgatggatggtaacaccctgaaagccggtgcggtggcgggcgttagtcatctgcgtaatccggttcttgccgcccggctggtgatggagcaaagcccgcatgtgatgatgattggcgaaggggcagaaaattttgcgtttgctcgtggcatggagcgcgtcagcccggagattttctccacgtctttgcgttatgaacaactactggcagcgcgcaaggaaggggcaaccgtcctcgaccatagcggtgcgccactggatgaaaaacagaaaatgggcaccgtgggggccgtggcgttggatttagacggcaatttggcggcagccacgtccacaggcggaatgaccaataaattacccggacgagttggcgatagtcccttagtgggtgccggatgctacgccaataacgccagtgtggcggtttcttgtaccggcacgggcgaagtcttcatccgcgcgctggcggcatatgacatcgccgcgttaatggattacggcggattaagtctcgcggaagcctgcgagcgggtagtaatggaaaaactccctgcgcttggcggtagcggtggcttaatcgctatcgaccatgaagggaatgtcgcgctaccgtttaacaccgaaggaatgtatcgcgcctggggctacgcaggcgatacgccaaccaccggtatctaccgtgaaaaaggggacaccgttgccacacagtgatgaacttgatgccggtaatgtgctggcggttgaaaatctgaatattgcctttatgcaggaccagcagaaaatagctgcggtccgcaatctctcttttagtctgcaacgcggtgagacgctggcaattgttggcgaatccggctccggtaagagtgtgactgcgttggcattgatgcgcctgttggaacaggcgggcggtttagtacagtgcgataaaatgctgttgcagcggcgcagtcgcgaagtgattgaacttagcgagcagaacgctgcacaaatgcgccatgttcgcggtgcggatatggcgatgatatttcaggagccgatgacaagcctgaacccggtatttactgtgggtgaacagattgccgaaagtattcgtctgcatcagaacgccagtcgtgaagaagcgatggtcgaggcgaagcggatgctggatcaggtacgcattcctgaggcacaaaccattcttagtcgttatccgcatcaactctctggcgggatgcgccagcgagtgatgattgcgatggcgctgagttgccgcccggcggtgctgattgccgatgagccaaccaccgcgctggatgtcactattcaggcgcagatcctgcaattaatcaaagtattgcaaaaagagatgagcatgggcgttatctttatcactcacgatatgggcgtggtggcagagattgccgatcgggtactggtgatgtatcagggcgaggcggtggaaacgggtaccgtcgaacagatttttcatgcaccgcaacatccttacacccgtgcgctgttagctgctgttccgcaacttggtgcgatgaaagggttagattatccccgacgtttcccgttgataagccttgaacatccagcgaaacaggccccccccatcgagcagaaaacggtggtggatggcgaacctgttttacgagtgcgtaatcttgtcacccgtttccctttgcgcagcggtttgttgaatcgcgtaacgcgggaagtgcatgccgttgagaaagtcagttttgatctctggcctggcgaaacgctaagcctggtgggcgagtctggcagcggtaaatccactaccgggcgggcgttgctgcgcctggtcgaaagccagggcggcgaaattatctttaacggtcagcgaatcgataccttgagtcccggcaaacttcaggcattacgccgggatattcagtttatttttcaggacccttacgctagcctggacccacgtcagaccatcggtgatagcattatcgaaccgctgcgtgtacacggtttattgccaggtaaagacgcggctgcacgcgttgcgtggttgctggagcgcgtgggcctgttacctgaacatgcctggcgttacccgcatgagttttccggcggtcagcgccagcgcatctgcattgctcgcgcgttggcattgaatccaaaagtgatcattgccgacgaagccgttagcgcgctggatgtttctattcgcgggcagattatcaacttgttgctcgatctccagcgtgatttcggcattgcgtatctgtttatctcccacgatatggcggtggtagagcggattagtcatcgtgtggcggtgatgtatctcgggcaaattgttgaaattggtccacggcgcgcggtcttcgaaaacccgcagcatccttatacgcgtaaattactggcggcagttccggtcgctgaaccgtcccgacaacgaccgcagcgtgtactgctgagcgacgatcttcccagcaatattcatctgcgtggcgaagaggtggcagccgtcagcttgcaatgcgtcgggccggggcattacgtcgcacaaccacaaagtgaatacgcattcatgcgtagataacattcaggcggagaataaaatggcaagagctgtacaccgtagtgggttagtggcgctgggcattgcgacagcgttgatggcatcttgtgcattcgctgccaaagatgtggtggtggcggtaggaagcaatttcaccacgctcgatccgtatgacgcaaatgacacgttatctcaggccgtagcgaaaagcttttaccaggggctgttcggtctggataaagagatgaaactgaaaaacgtgctggcggagagttataccgtttccgatgacggcattacttacaccgtgaaattgcgggaaggcattaaattccaggatggcaccgatttcaacgccgcggcggtgaaagcgaatctggaccgggccagcgatccggcgaatcatcttaaacgctataacctgtataagaatattgctaaaacggaagcgatcgatccgacaacggtaaagattaccctcaaacagccgttcagtgcgtttattaatattcttgcccatccggcgaccgcgatgattagtccggcagcgctggaaaaatatggcaaggagattggtttttatccggtgggaaccggaccgtatgaactggatacctggaatcagaccgattttgtgaaggtgaaaaaattcgcgggttactggcagccaggattgcccaaactggacagcataacctggcgtccggtggcggataacaacacccgcgcggcaatgctgcaaaccggtgaagcgcagtttgctttccccattccttacgagcaggccacactgctggagaaaaacaaaaatatcgagttgatggccagtccgagtattatgcagcgttatatcagtatgaacgtgacgcaaaagccgttcgataacccgaaggtccgtgaggcgctgaattacgccattaaccgtccggcgctggtgaaagttgcctttgcgggctatgcaacgccagctactggtgtggtaccgccaagtatcgcctacgcgcaaagttataaaccgtggccttacgatccagtgaaagcgcgcgaattactgaaagaggcgggatatcccaacggtttcagtaccacgctgtggagcagtcataaccacagcaccgcgcagaaagtgctgcaatttacccagcagcagttagcgcaggtcgggattaaagcccaggtgactgcgatggatgccggacagcgggcggcagaagttgaaggtaaagggcaaaaagagagcggcgtgcggatgttctacactggctggagcgctagtaccggcgaagcggactgggcactaagcccgctgtttgccagccagaactggccaccgacgctgtttaataccgcgttttacagcaataaacaggtggatgacttcctggctcaggcactgaaaactaatgatccggcggaaaagacccgcttatataaggcggcgcaggatatcatctggcaagaaagcccgtggatcccgctggtggtagaaaaactggtgagcgcacacagtaaaaacctgaccggtttttggatcatgccagacaccggcttcagctttgaagacgcggatttgcaataagcaacgcagggagtggaatgcttaattacgttatcaaacgcttactggggttgattccgacgctgtttatcgtcagcgtgctggtgtttttatttgtccatatgctgcccggcgatccggcgcgattgattgccgggcccgaagctgatgcgcaggttatagaactggtgcgtcagcagctggggttggatcagccgctgtatcaccagttctggcactatatcagcaatgctgtgcagggggattttggcctgagcatggtgagccgtcgtccggttgccgatgagattgccagccgctttatgccaacgctgtggctgaccataaccagtatggtctgggcggttatatttggtatggcggcgggaattatcgccgccgtctggcgtaaccgttggccggatcgattgagtatgaccattgcggtgagcgggatcagctttccggcatttgctctggggatgcttttaattcaggtattctccgttgaactgggctggctgcctaccgtgggagcagacagttggcagcactacattttaccctccctgacgctcggcgcggcagtggccgccgtgatggcgcgctttacccgcgcgagctttgtcgatgttttaagcgaagattatatgcgtaccgcgagggcgaaaggggtgagcgaaacctgggttgtcctcaaacacgggctacgtaacgcgatgatcccggtagtgaccatgatgggcttacagtttggctttttgctcggtggttccatcgttgtggagaaagttttcaactggccgggacttggacgcttactcgttgactccgtagaaatgcgtgattacccggtgattcaggcggaaattctgcttttcagcctggaatttattcttatcaacttagtggtggatgtgctttacgccgccattaacccggctatcaggtacaagtaaggatgcgactatttaactggcgacgtcaggcggtgttaaacgccatgccactggtcaaacctgaccaggtacgtacaccgtggcatgaattctggcgacgatttcgccgtcagcatatggcgatgaccgccgcattattcgttattttattgattgtggtggccatttttgcacgctggatcgctccctatgacgccgaaaattattttgattatgacaatctgaataacggaccttctttgcagcactggtttggcgtcgatagtctggggcgtgacattttcagccgtgtcctggttggtgcgcaaatcagcctggcggcgggcgtgtttgccgtgtttatcggtgcggcgatcgggacgttgctgggcttgctcgctggatattatgaaggctggtgggatcggctgatcatgcgcatttgcgatgtgctgtttgccttcccgggtattttactggcgatcgctgttgttgcggtgttgggaagcggcattgctaacgtgattattgcagtcgccattttttccatccccgcgtttgcccgcctggtgcgcggcaacacgctggtgttgaaacagcaaacctttattgagagtgcacgcagtattggtgccagcgatatgaccgttttgttgcgtcatatcctgcctgggaccgtctcttctatcgtggtgtttttcaccatgcgcattggtaccagcattatctctgccgccagcctcagttttctcggcctcggtgcgcagccgccgacaccagagtggggagcaatgctcaatgaggctcgagcggatatggttatcgcgccgcatgtcgctgtttttccggccctggctatttttctgaccgtactggcgttcaatttgttgggcgatggtttacgcgatgcgctggatccgaaaattaaaggataattacgtttgaatattgcttgaaagggtaatcacctcacaggaaattattgccctaagcaagtgttgtaactttctgctgattttgtagaatcgggtaatttggttaaaaagccgcagcaagggacaatttttgcagcggcacagcgttcagatagttattttgttaaatgtattaacatgctgagtttatacgaaaagataaagataaggctgataattttatttttattggcagcactgagttttattggtctttttttcatcattaactatcaactggtaagcgagcgcgcggtaaaacgtgccgatagccgctttgaacttattcagaaaaacgttggctatttctttaaagatattgaacgtagcgccctgacattaaaggacagtctgtatttattaaaaaatacagaggagattcaacgcgccgtgattcttaaaatggaaatgatgccatttttagacagcgtgggactggtacttgatgataataaatattatctttttagccggagggcgaatgataaaatcgttgtttatcatcaggaacaagtaaatggaccgcttgtcgacgagagtgggcgggttatttttgccgattttaacccaagcaaacgaccgtggagcgtggctagtgatgactctaacaacagctggaatccggcatacaattgctttgatcgtccgggtaaaaaatgtatctcttttacgctacacatcaacggcaaagatcacgatttgttagcggtggataaaattcatgtcgatttaaactggcgatatctgaacgagtatcttgatcaaatcagcgctaatgatgaagttctatttttgaaacaaggccatgagatcattgccaagaatcaactcgctcgtgaaaaactgattatttataatagcgaaggtaattataatattattgattctgtcgatactgaatatatcgaaaaaacaagtgcggtgccaaacaacgcattattcgaaatctatttttattatcctggcggtaatttattgaacgcaagtgataaacttttttatctgccgtttgcgttcattattatcgtattgctggtggtttatttaatgaccactcgtgtgttccgtcggcaattttctgaaatgacagagctggttaatacgctggcgtttttgcctgacagtacggatcaaatcgaggctctgaaaattcgtgaaggcgatgcgaaagagattatcagcatcaaaaatagcatcgcggaaatgaaagatgccgaaattgaacggagtaataaattgctcagtctgatctcttacgatcaggaaagtggttttattaaaaatatggcgattattgagtctaacaataatcagtatctggctgtggggatcatcaaactgtgtggtctggaagccgtggaagcggtgtttggtgttgatgagcgcaataaaatcgtcaggaaattgtgtcagcgaattgccgagaaatatgcgcaatgctgcgatatcgtgacattcaatgccgatctctatttacttctgtgtcgggaaaatgtacagacatttacccgtaaaatagcgatggtaaacgattttgacagcagctttggctaccgcaatctgcgcatccataagtctgccatttgtgaacctttgcagggggaaaacgcctggagttacgcagaaaaactgaaactggcgatttccagtatccgtgaccatatgttcagtgagtttattttctgtgatgacgcgaaactcaacgaaatagaagagaatatctggattgcgcgtaatattcgccatgcaatggaaattggcgaactattcctcgtctatcaaccgatcgttgatattaacacccgcgccattctgggcgcggaggcgttgtgccgttgggtgtctgcggagcgggggatcattagtccgctgaagttcattaccattgctgaagatatcgggtttatcaatgagctgggttatcagattattaaaacggcaatgggtgaattcagacattttagtcagcgtgcgagcctgaaggatgatttcttactgcatattaatgttagcccctggcagttaaacgaaccacactttcatgagcgttttaccaccatcatgaaagaaaatggcctgaaggcgaacagcctctgtgttgagatcactgaaaccgtgatcgagcgaattaatgaacatttttatctcaatattgaacaactgcgtaaacaaggggtacggataagcattgatgactttggcaccggtttgagtaacctgaaacgtttttatgaaattaatccagacagcataaaggtggacagccaattcaccggcgatattttcggtactgcgggaaaaattgtgcgcattattttcgacctggcacgctataaccggatcccggtgattgcggaaggcgtagagagcgaagacgttgcgcgcgaattaatcaaattaggatgtgttcaggctcaggggtatctgtaccagaaacccatgccattctccgcctgggataaaagtggaaaattagtaaaagagtaatttacgtatgtccagaatcaataagttcgtacttacagtcagtctgctgatttttatcatgattagtgcagttgcctgcgggatctacactcaaatggtaaaggaacgggtgtatagcctgaaacagtccgttattgatactgcttttgcggtggcaaatattgctgaatatcggcgtagcgtggcaattgatcttatcaacacgctaaatcccacggaggaacagctgttggttggtttgcgcacagcttacgccgacagcgtttccccctcttatttgtacgatgtcggtccttatctgatttccagtgacgaatgtattcaggtaaaggagttcgagaaaaattattgtgcagatattatgcaggttgtgaagtatcgacatgtcaaaaatacagggtttatctcttttgacggtaaaaccttcgtctattacctctatccggtaactcacaatcgtagtctgatatttttgcttggtctggagcgtttttctttactgagtaaaagcctggcgatggacagcgagaacctgatgttctctctatttaagaacggtaaaccggtgaccggtgatgaatataatgctaaaaacgccatcttcaccgttagcgaagcgatggagcacttcgcctatttgccgaccggattgtatgtatttgcgtataaaaaagatgtttatttgcgggtttgtacattgattattttctttgccgcattggtggcagtgataagcggtgccagttgcctctatctggtacgcagagtgattaatcgtggtattgtggagaaagaagccatcattaataaccattttgaacgcgtactggatggcgggcttttctttagcgctgccgatgtcaaaaaactctacagtatgtataacagcgcgttcctggacgacctgaccaaagcaatgggcagaaaatcctttgacgaagatttaaaagcgctgccggaaaaaggcggttatttgtgcctgtttgacgtcgataaattcaaaaacattaacgacaccttcggtcatttgctgggcgatgaagtgttgatgaaagtggtgaaaatccttaaaagtcagatcccggtagataaaggtaaagtctaccgcttcggcggtgacgaatttgcggtgatttatacgggtggaacgctggaagagttgctaagcattctaaaagaaatcgttcatttccaggtgggaagcattaatttaagtaccagtatcggtgtagcacatagtaatgaatgtcctaccgtcgaacgcttgaaaatgctggcggatgagcggctgtataagagtaagaaaaacggcagggcacagattagctggcagtaatcattattcgcaggccggacaaatgattttgcccggcctgaattaattaaacccggctaccccacaaatcgtactcatcggcgtgctcgactttcacacgcaggatatcacccggcttaacgttggtttcaccattgagataaaccgcgccgtcgatttccggtgcatctgccatgctgcgaccaatcgcgccttcttcgtccacttcgtcgataatcaccagaatttcacggcccactttctcttgcaggcgctcggcggaaatctgctgctgcagctgcatgaaacggttccagcgttcttctttaacttcttccggaacctggtcaggcagggcattggcgtctgcaccttcaaccgggctgtatttaaagcagccaacgcgatccagacgcgcttctttcaggaagtcgagtagcatctggaaatcttcttctgtctcgccagggaagccgacaataaaggtactgcgtagggtcagttccgggcagatttcgcgccactgtttgatgcgcgccagttggcgatctacagaacccggacgcttcatcagtttgagaatgcgcgggctggcgtgctgcaacggaatgtccagatacggcaggattttgccttctgccatcagtgggatgacgtcgtccacatgcggataagggtaaacgtagtgcagacgtgtccagatccccagtttgcttaactgttcgcacaggctgaccatgctggtttttaccggctcgccgttgtggaagccagtacgatgtttaacatcaacgccataggcggaagtatcctggctgatcaccagaatctctttaacgcccgcatctaccagacgtttcgcttcacttaacacttcgccaatcggacggctcaccaggtcgccgcgcatagacggaataatgcagaaggtgcagcggtgattacagccttcagaaattttcagataggcataatgacgcggcgtcagtttcacaccttgttctggcaccaggctcaggaatgggttgtgtttcggttttggcacgtagtgatgaacgtgctccagaacctgctcatagctatgaggcccggtgatttccagcactttcgggtggacttcgcggatctgatcttcttttgcccccagacaaccggtcacaataaccttgccgttttcattcaacgcttcaccaatggcttccagactttcttgtaccgcgctgtcaataaagccgcaggtgttgacgatcaccatgtccgcatcgtcatagctcggtaccacgtcataaccttcagtgcggagttcggtgagaatacgctcactatcaacaaggtttttcggacagccaagggaaacaaagccgattttcggctggggagttactttgctcatagcttaaaaaatattcagttacaggaaaggtcagggcagggattctacagagttctggataaaatttgtatcgcaatctcattcgctggcggaggcgaaggaaatgtaaattttgttaattcggcgtgaagaattgatcctggacagcattttgctcaaaaaatagccatactatttaattgcaacaaggctgggaagaggaggatcgaagtatgttcgttgacagacagcgaatcgatctgctgaaccggttgatcgacgcacgcgttgacctcgccgcatacgtgcaactgaggaaggcaaaaggatacatgtccgtcagcgaaagcaatcatctacgagataacttttttaaactgaatcgcgaactgcacgataaaagcctgcggttgaatcttcatctggatcaggaagagtggagtgctcttcatcatgctgaagaagcattagcgacagccgcagtatgtttgatgagtgggcaccatgattgcccgactgttattaccgtcaacgccgataagcttgaaaattgtctgatgagcttaacgctgagtatccagagcctgcagaagcacgccatgcttgagaaggcctgaaaactaagggggagaaagcgtctcccccttcatgtttaagtttttgtaaaaatgaatttgttatctcctccactgactacgctttaagccagagtcaatccggaggcgttatgcatcgacaatcctttttccttgtgccccttatttgtctttcttccgctctctgggcggctcctgcaacggtaaatgtcgaagtactgcaagacaaactcgaccatccctgggcactggcctttttacccgataatcacggtatgttaatcactctgcgcggcggcgagttgcgtcactggcaagcaggaaaaggattatctgcgccgctttccggagttccggacgtttgggcgcacgggcagggcggcctgctggacgtggttttagcgcctgattttgctcagtctcgccgcatctggttaagttattccgaagttggcgatgatggcaaagccggaactgctgtgggttatggccgcttaagtgatgatctcagtaaagtgaccgacttccgcaccgtctttcgccagatgccaaaactgtctaccggcaaccattttggcgggcggctggtattcgacggtaaaggttatctttttattgctctgggcgaaaacaatcagcgcccgacggcgcaggatctggataaattacagggcaaactggtgcgtctgaccgaccagggcgaaatcccggatgataatccttttataaaggaatccggtgcgcgcgccgagatctggtcttatggcattcgtaatccgcaaggaatggcgatgaatccgtggagtaatgcactgtggctgaatgaacatggcccgcgcggtggtgatgaaattaatatcccgcaaaaaggcaaaaactacggctggccgctggcaacctggggaatcaactatagtggctttaagataccggaagcgaaaggggagatcgtcgccgggaccgagcaacctgttttttactggaaagatagccccgctgtgagcggcatggccttctataacagcgataaattcccccagtggcagcaaaaattatttattggcgcgctgaaagataaagatgtcattgtgatgagcgtcaacggcgacaaagtgacagaagatggccgtattttaacggacagagggcagcgaattcgtgatgttcgcactggacccgacggttatttatacgttctcaccgacgagtccagtggggaattacttaaagttagcccacgcaattaactaacgggaatcatcaccactttgcgcactgcggggcgttcagtgagttgctgataccagcgttgcagatttggacgcggtgtccaggtcaggccaacgttaaacaaattgtagatgaacggtgcgatagcgatatcgcccacaccaaactcgtcgccagagaaccattttacttttgccagttccgcatcgagcagggcaaacagggcgtcgcactctttgcaactggcatcaatggcggcctgatcgcgctcttccggtggtgttctgactaatcccatcaggatcccgcgatgagcattactgagcgtctggtttgcccagtccatccatttttccgcttccgcacgacgtgccggactgtcgatccacaggcgtttttgcccgtactgtgccgccagatagcggacaatggcgttactttcccaaagaatgagatcactttcgtcgtcacgcaacaacggcaccagcccgttagggttcatcgccagaaaatcagcatcgtgatttatcccaaactcacggcccgcgagaatttgctcataaggtagttccagttcttcgagcgtcagcaatactttttttacgttagtactattattccgaccccacagcgtaatcatactcaccccttttccgacaggcagccacaggctgaacaggactccgatggtgaagtaaagttaacttttaagcaacagctggcaaaaaaatgacaccagaagcagcgaagcggcaggatattgcataaactttaaaaactttaccaacttacggtttctttaagtttgtgtgtgcgttattaatcaccaaacttatcatacggcgatataacgtattttttttgaatggatactcgggtggcatttatgacgcaatactcctctctccttcgtggtcttgcagcgggttctgcatttttattcctttttgccccaacggcattcgcggcggaacaaaccgttgaagcgccgagcgtggatgcgcgtgcatggattttaatggattacgccagcggtaaagtgctggcagaaggcaatgcggatgagaaactggatcccgcgagcctgactaaaatcatgaccagctatgtggttgggcaggcgcttaaggccgataagattaaactcaccgatatggtgacggtcggtaaagatgcctgggcgacgggaaatccggcactgcgtggtagtagcgtaatgttcctcaaaccgggcgatcaggttagcgtggcagacttgaacaaaggtgtgattatccagtccggtaatgacgcctgtattgcgctggctgattacgttgccgggagccaggagagttttattggtctgatgaatggttatgccaaaaaactgggtctgaccaacactaccttccagacggtgcacggcctggatgcgccggggcagttcagcaccgcgcgcgatatggcattgctgggtaaagcattgatccacgatgtgccggaagagtacgccattcataaagagaaagagttcaccttcaacaaaattcgtcagcctaaccgtaaccgtctgctgtggagcagcaatctgaatgttgatggcatgaagacaggaaccacggcaggcgcgggatataatctggttgctagcgctacccagggcgatatgcgtttaatctccgtagtgttgggggcgaaaaccgaccgtatccgttttaatgagtctgagaaattattgacctggggtttccgcttctttgaaaccgtgacgccaattaaacctgatgccacctttgtgactcagcgcgtctggtttggtgataagagcgaagtgaatctcggggcaggtgaagcgggcagtgtgaccataccgcgtgggcagctgaaaaacctgaaagcgagttatacgttaacggaaccgcagcttaccgcaccgctgaaaaaaggtcaggttgtcgggaccattgatttccagcttaacggtaaatccattgagcagcgtccgctgatcgtgatggaaaatgtggaagagggcggattctttggtcgggtgtgggatttcgtgatgatgaaattccatcagtggttcggcagctggttctcttaatcttctgataaccggatggcgcgaaacgtcatccggttatacgtcattaatacatcaacttaatgcgctgcgtctgcgcgtacttcacatactcatcttccgggcaacaatcgctcaccacaatatcaaagcgtttcaggtcacccatgcgcgccggacgcaccttgccaaatttactgtggtcgacaaccagcacatgcttttgcgccatgctcatggcccagtgttttaccggcaactcttcaagattaaaacaggtagcgcctttactgacatgcacgcccgccgcagaataaaaagcgatatccgggcaaaaattattcagcgtttgctgaaaatcgatgggtttgaaaatggcgttgctggcgtgaaattcaccaccgcaaagaaacgcgcggcaatggggtttctctttcagcgccagaaaggtatttaggctataacaaacggcggtaaaagggatttcattatcaatcgcttcaataatccacggcgtggtggtgccacagtcaaaaaagagggtctgatcgggttctaccagcgtcgcagccagttttgccgcccggcgtttttcttccaccaggcgggatttttgatcgcttaacaggtaatggctggcactgcgcggttccagaacaatatagccgccgagcaaaacgacgggcgcactgtggttgttcagatcgcgacgaatcgtcatctcgctaaccccaagcagggcggcggcgtctttaagatgtaacttatcgctgcgttttaattcttgcagcagctgcccgatacgctcttcgcgacgtgtttccataatccctctgaatagttattgaagcgagccgctcaatactacactttttagcagagatcagtcacgcacccagcctttgcggatcggtaatgcaaaacagacgcgataccagctttgcagacgttgatagagtttatgccccatcgcttgccagataatctgggcactaaggcagccaatcatacctgccagcaatccaccgagcatatccagcggccagtggacgccaagataaacgcggctccaggcaatgacgacggccagcaccattaaaagactgccggaccacaggcgatgccagcataaaaatgccagtgcaaaggtgaaaatcaccgtaccgtgatcgcttgggaaactgtcatccgccgcatgatgcaggaagttatagccgatattttcgacaaagggtcggtcgtgcggaaaaagatgtcccatcgtccaggacacaaacaggctgaccgccagcgcgatagcgatttttatcaccagttgccgttgtgctgtaagcccccacaaccaaagtaccacggccagcaacggcaccacggtaatcaaatctttagcaataaaaatcgccaagctgatcatccacggagcgctgtctggcgtcgcgttaataagagagaatagagagagattcaaattttccagcataacttcccgacgcaaagtgattaaaagggagccaatacaggcaagtcgttgagaataaagtgcaggttaaactgggtaaagcggcatcgtcttatttccctcaagcggcctgtttacggtgggtgattgtaacgggcataggttaaataaaacttaaagaaagcgtagctatactcgtaataatgtaagaatgtgcttaaccgtggtttcagctacaaaattcgctttctcgttagctgcgcttttattaaactctgcgcgattattattggcgaagaaattgcatgcaaaataaattagcttccggtgccaggcttggacgtcaggcgttacttttccctctctgtctggtgctttacgaatttagtacctatatcggcaacgatatgattcaacccggtatgttggccgtggtggaacaatatcaggcgggcattgattgggttcctactagcatgaccgcgtatctggcgggcgggatgtttttacaatggctgctggggccgctgagcgatcgtattggtcgccgtccggtgatgctggcgggagtggtgtggtttatcgtcacctgtctggcaatattgctggcgcaaaacattgaacaattcaccctgttgcgcttcttgcagggcataagcctctgtttcattggcgctgtgggatacgccgcaattcaggaatccttcgaagaggcggtttgtatcaagatcaccgcgctgatggcgaacgtggcgctgattgctccgctacttggtccgctggtgggcgcggcgtggatccatgtgctgccctgggaggggatgtttgttttgtttgccgcattggcagcgatctcctttttcggtctgcaacgagccatgcctgaaaccgccacgcgtataggcgagaaactgagtctgaaagaactcggtcgtgactataagctggtgctgaagaacggccgctttgtggcgggggcgctggcgctgggattcgttagtctgccgttgctggcgtggatcgcccagagcccgattatcatcattaccggcgagcagttgagcagctatgaatatggcttgctgcaagtgcctattttcggggcgttaattgcgggtaacttgctgttagcgcgtctgaccagccgccgcaccgtacgtagcctgattattatgggcggctggccgattatgattggtctattggtcgctgctgcggcaacggttatcagtagccacgcgtatttatggatgactgccgggttaagtatttatgctttcggtattggtctggcgaatgcgggactggtgcgattaaccctgtttgccagcgatatgagtaaaggtacggtttctgccgcgatgggaatgctgcaaatgctgatctttaccgttggtattgaaatcagcaaacatgcctggctgaacgggggcaacggactgtttaatctcttcaaccttgtcaacggaattttgtggctgagcctgatggttatctttttaaaagataaacagatgggaaattctcacgaagggtaaaaaaatgcctgactgctttgtgcgatcaggcattctcgaattaatggtgatggtcgtcaatctggtgttcgataaccatcccttcacctacgctggcaagatggcgaacataaggatgcgggcggtaagccggagctggcgcaggagccacatagacggtttgcggcacagtcgcgacgctgaccgcttgtggaacgctgacactatcaggaaccacaaccactttgtatccactcggcacatcgacggtgacactttgcgccatcgccacaccagtaaagcccattaaaagcgcgcccaacagtagacaatttttcataatcatttcgcctgaaataatgcagcgggttaatttccgcgaattatgcagccttcattcaggcattgtgttgccgggcgtgctgccggttttattggtcaaatggcgcttcgtgtttaagaactttatcgatcacatccagtacgccttcacggttattggagcctgcgcggtattttgccgctgcgacgaccgcgctaccggcattttccattgcaaaactaaagcctgcctgacgcagcatctcaatatcgttaccgccatcgccaaagaccaccacttcgctgtcgtctattccccataatttctgcagttggcgaaggccattggctttatgtacgccggggataatcagatcgatgctgccgttgccggtgtggacgctcaccataatatcgccgatggcctcatgtaatgctttttgtacttgtggaatcagttcatcggaaagattcaggccaaacttaaagaagatatcctctaagttgtcaaagttatcgacgtattccagacggtgataatacatttccgccaccgttttcatggcatcgtcatattttttgagtgtataggcactattttttccgcaggcaataatttccacttccgggcgcgtcagcaaatgttccacgacagtagcaaacgcatccttgcttagctcgccattaaaaacatctttgccttcgctcactacccagccgccgttttcagccacaaaggcaatttcattagcaatttcagggaagaaagagatcaactgataatattgattcccgctggcgactacaaagcgaattccttgtgctttcatttgctgatactgagccataaaccgctcacggttataggttttttgatcgcttaagaaagtaccatccatgtctaccgcaattaatttaatgctcatcaactattctccatcgccgtctgcgttttggtatcgggtttggcgacggctttcgcgacaatagccgcgagaataaccagcgccagtacaaccagcattgcactacgtaatccataatgttcgccgagatagcccagcagcggcggcccgacgaggaaagccagataaccggtcgttgctaccacactgacgcgggttggtgcatcggggccggtatcgctggcggcagaaatggtcagcgggaagcccaggctggcacccagtccccagagtacaacagacaccccagcgacccaggcgctatcgacaaaaataatcagcccaatacccaacgcccccattagtgcactggcccgaaccacggcaacgcgactgtaacggtcgatgaaccaaccgccggtgaagcgtccaacggtcatccccagggtaaaaccggcataaatcaggctgccggaagtagggctaaaaccgtgaccgtcaaccattaataagggtaaccagtcgttggcagaaccttcggcaaaggccatcgccagcaccacaacacctatcagcagcaactggatatcgcgataaaaaggtacgcctttttcgccatgctgggtgccatcggcagcatttttgcccgtaccgtcagggattgcctgaatggcgatataaataggtgcgatacctaccagcgccgccaataaaatgtgcaccgttgccggaacgccaaaggccgtcagtgccatcccgacacctgcgcctgccagcgtgcccaggctataaaaaccgtgcatcatcggcaaaaccgtcttattcatttctcgctcaacggcagcaccttcaacgtttatcgccacttccgcagaaccaaaacttgccccaaagacgccgagaccaacggcaaagagcagggggcttgtcagccagagtgccagacttaatatcatcatcccgatcaatgcgcaggacatcgtgaccaggatgacattacgtgtcccaaagcgtttcactaaccacgcgctgcagagaataccgctcatgctaccgatgctcagaccaaagagaacaccgcccatttcagcgatgctgacagagagaatatcgcggatagcaggcgtacgggttgcccaggacgccattaacaggcctggcaaaaagaagaacataaacagcgcccaggttcggcgtttcaatgcattacgactagaatttacggtcatagatcacgtcaaaataagaagagggaagacaacattagcaaggttgtgtacatttgtacacaattgcagagagaggaaatgacatgcgtcgcgctaacgatccgcaacggcgagaaaaaattatccaggccacgctggaggcggtgaaactttacggaatacatgctgttacgcaccgcaaaattgctacccttgccggggtaccgttgggaagcatgacctactattttagtggaattgatgagttgttactggaggcgttcagcagttttactgagatcatgtcccggcaatatcaggcattttttagcgatgttagtgatgctccgggcgcatgccaggctatcaccgatatgatctacagcagtcaggttgcaacgccggataacatggagctgatgtaccagctctacgcgctggctagccgaaaaccgctattaaaaacggtaatgcaaaactggatgcagcgcagtcagcaaacgctcgaacaatggtttgaacccggaaccgcccgcgcgcttgatgcgtttattgaggggatgacgctgcattttgtcaccgaccgtaagccgctaagccgcgaggagattttgaggatggttgagagggttgcagggtaatagataagttttagataacaaaaaacccatcaaccttgaaccgaaatggcggggttgatgggctccacaaaatggggacatcaaagaaaagcagtggcactaattaagactgatgccctgcggaaaagttctgcggttgtgcaaaaaaatttcattttcagggcaacttcagttttatcctaatcctggccataccatgacgatgattgtccctgccagcgtcagcaggacgttggcgattgcataggtgcccgcatagcccagcgccgggatgttactgcgagctgtatcactgatgatctccattgccggcgcgcaggtacgtgcgcccatcattgcgccgaacaacagcgcgcggttcattcgcaatacataagcaccgaacaagaaacagataaccacgggcaccagactgacaatcaatccggcaatcaacatctgaccgccaatcgcgcccaggccgttattaataccgctaccggcgctcagaccaacgcctgccataaacaccatcaagccgaactctttcaccatgcttaatgcaccctgcggaatgtaaccgaaggtcgggtggttagcacgcataaagcccagcataattccggcgaataacaacccggcagcgttccccatgccgaaactgaatgtgctgaactggaaggtgatcatcccgatcatcagcccaataacaaagaaggcgcagaatgccagcaggtcagtgacctggctgtgaatgctgataaagccgatgcgatcggcgatggtttttacgcggcgggcatcgccgctgacttgtaaaacgtcacctttgttaagcacgacgttgtcatctatcggcatctcaatctggctacgaatgacgcggttaaggaagcaaccgtgatcggtcaacttcagttgtgcgagacgtttacctacagcgttatggtttttaacgaccacttcttcagtgacgatacgcatgtcgagaaggtcacgatcgaaaacttctttaccgttacggaagctgggatcgagtcgggcatgggcgtcgggatagcctaccaacgctatttcatcgcccatttgtagcacggcatcaccgtctggatttgccagaatcccgttacgtcgaatacgttcaatgtagcagccggtttgtcgataaatacccagttcacgcagatttttgccgtcggtccaggccaccagttccgggccgacgcgataggcgcggatcaccggtaaataaaccttacggttggcatcagtgtccaggccacgttcgcgggcgatttgctgggcgctggtctgtaagtcctgatgctgcaatttcggcaagtaacgcgcaccaacaatcaaactcaccagaccgattaaataggttaaggcatacccgaggctcagattatccagtgccagactgagctgcctgctttccatgccggaatgacgcagtgtatcgccagcaccgaccagaaccggtgtgctcgtcatagagcctgctaacataccggccgtcaggccaatatcccagccaaacagcttacctaaccctaaggcgatcaccagcgcactgccaaccatcaccagtgctaacattaggtaatttttcccatcgcgaaaaaaaatggaaaaaaagttcggtccggcttcgaccccgacgcagaaaataaacagcataaagccaagattaagcgcatcggtgttaatgctgaaatgttgttggcctaataacaggcttacgactaaaacgccaatggaattacccagttggatgctaccaagtcgtaactttccgagacatagcccaagcgcgaggaccacaaataataacagaatgtaattcccatttaacaattcggcgacgtttatattcacggaggctaacttcttgtttactagtaagctgttgaaagaaatggtaatttacgataatgttttttaccagaattcagggcgcagattcattcagcgcacctaaacgatagtaaagtaacaatatattttactagtgtaatcacattaggtatcaacggctatatgaattgcgttggcctatattagcatggaatgcgaagcggctttatcttactgaacgccacactggcgaaaaatgtgttcgatagacgcagtgtcaggaggaacgagtgaaacataaacaacgttgggcgggggcaatctgctgttttgtcctcttcattgtggtgtgcctttttctggcgacgcacatgaaaggcgcttttcgggctgccgggcatcctgaaatcggcttgctatttttcattcttcctggagcagtcgccagcttctttagtcagcgtagagaagtcctgaaacctctgtttggcgcaatgctggcggcaccctgtagcatgctcattatgcggctgttttttagtccgacgcgcagtttctggcaagagctggcatggttactaagcgcggtgttctggtgtgcgctgggggcactgtgtttcttatttatcagtagtttgtttaaaccacagcacagaaaaaatcagtaaagccctcaacgcgagggcttgtcagacgatcaggcgtccagattttctttcacccatgcagcaaaatcggtatagccgccgatatgttgctgatcgacaaaaatctgcggcacggtttctacgggtttacctgccttttgttgtagatcttctttagtgatcccttccgcacgaatatctacatactgatactgaaaatcatcgcgttcattgctcaatttctcagccagatcttttgcacgcacacagtaagggcaaccgctacgaccaaaaataacggtttgcattatttctctcctcatagatttatgcctgtaatgatcacgctaaaatgtattcgctgaaagtaggtttaacctgttgcattaattgctaaaagctataactgttaaacacaatacagtgaaaagttttagactgaaggctcactttgcagagggaagcgtatgcgcgcgatcggtaaattgcctaaaggcgtgttgatactggaatttatcggaatgatgctactggcggtggcgctgctgagcgtaagcgactccctgagcctgcctgagccattttctcggccagaagtgcagattctgatgatttttctcggtgttttgctcatgcttcccgctgcggtggtggttattcttcaggtggcaaaacgtcttgccccacagctgatgaaccgtccaccgcaatatagtcgtagtgaaagagaaaaagataatgacgccaaccattgaacttatttgtggccatcgctccattcgccatttcactgatgaacccatttccgaagcgcagcgtgaggcgattattaacagcgcccgtgcgacgtccagttccagttttttgcagtgcagtagcattattcgcattaccgacaaagcgttacgtgaagaactggtgacgctgaccggcgggcaaaaacacgtagcgcaagcggcggagttctgggtgttctgtgccgactttaaccgccatttacagatctgtccggatgctcagctcggcctggcggaacaactgttgctcggtgtcgttgatacggcaatgatggcgcagaatgcattaatcgcagcggaaagcctgggattgggcggggtatatatcggcggcctgcgcaataatattgaagcggtgacgaaactgcttaaattaccgcagcatgttctgccgctgtttgggctgtgccttggctggcctgcggataatccggatcttaagccgcgtttaccggcctccattttggtgcatgaaaacagctatcaaccgctggataaaggcgcactggcgcagtatgacgagcaactggcggaatattacctcacccgtggcagcaataatcgccgggatacctggagcgatcatatccgccgaacaatcattaaagaaagccgcccatttattctggattatttgcacaaacagggttgggcgacgcgctaaaaccgccacgtcgatgtatgatacgcgggcttttgaccaggtctgacagagaggtgcagggtgaaaattgccatattgtcccgggatggaacgctctatagctgtaagcggctgcgtgaagccgctatacagcgcggtcacctggttgaaattcttgatccgctttcttgctacatgaacataaatcctgcggcgtcttctattcactacaaaggccgcaagttaccccattttgacgcagtgatcccgcgtattggcaccgccattaccttttatgggacggcggcactgcgccagttcgagatgctggggagctatccgctcaatgagagcgtcgccattgcccgggcgcgtgacaaattgcgttccatgcaactgctggcgcgtcagggcatcgacctgcctgtcacgggcattgcgcatagcccggatgataccagcgatttaatcgacatggtcggtggtgcgccgctggtggtcaagttggttgaaggcacgcagggaattggcgtcgtgctggcggagacgcgtcaggcggcggaaagcgtgattgacgctttccgcggtctgaacgcgcatattctggtgcaggaatatatcaaagaggcgcaagggtgcgatatccgctgtctggttgttggcgatgaagtggtcgctgcgattgaacggcgggcgaaagagggcgattttcgttccaatttgcatcgtggcggcgcggcaagcgtcgccagtatcacaccacaggagcgtgaaatcgcgataaaagccgcgcgaacgatggcgctggacgttgctggtgtggatattctgcgtgctaatcgcgggccgttggtgatggaggtgaatgcgagcccggggctggaaggaatagaaaaaaccaccggtatcgacatcgcgggtaaaatgatccgctggatcgaacgccacgctacgacagaatattgcctgaaaacgggtggttaatcgcaatcacattactgatcatggttttgcctgcgctttttgcgtaagctgtgccggtctttttatcgaaagaggttgtacaaaattatgacaagcctggtcgttcctggtctggatacgctgcgtcaatggctcgatgacctggggatgagtttttttgaatgtgataactgtcaggctctgcatctgccccatatgcagaatttcgacggtgtctttgatgccaaaatcgatctgatcgataacacgatcctgttttctgccatggcggaagtccgacctagtgccgtattgccgctggcggcggatttatctgccatcaatgccagtagcctgaccgtgaaagcatttcttgatatgcaggatgataatctgccaaagctggtggtttgccagtctttatccgttatgcagggcgtaacctatgagcagtttgcatggttcgtgcgtcagagcgaagagcagattagcatggtcattcttgaagctaatgcccatcaactgctgttaccgactgatgatgaagggcaaaacaacgttaccgaaaactatttcctccactgataactcctttcgagcacgcagtcgctggtgcagtggctgcgcgctgcaaaattatctgctgtttttaaccttttcttaaagattatttcacttctcttgtgtcgatttggctttatcacatagagcaaatatgcataaaaatttgttaaataccgttttttaatccgagctatagtctcaaaccctggctaaagttattcttgcgatgcttttatatagcgagcagtgctggccgggagaaagttctcttttcttacaccgcgccgataaaaaatatgcacgtttattgcatatctttcagtgtgacaacttttgttcgtttgttaacgaactttcagaaggaaagagatatgaccgccttaaataaaaaatggctaagcggtctggttgcgggtgctctgatggccgtctctgtcggcacgctcgcggctgaacaaaaaacactccacatttataactggtctgattatatcgccccggacacggtggccaattttgaaaaagaaaccggtattaaagtcgtctacgatgttttcgactctaacgaagtactggaaggcaaattaatggccgggagtaccggctttgatctggtggttccatctgccagctttctggagcgccagttgactgcgggagttttccagccgctggacaaaagcaaattgccggagtggaagaatctcgacccggaactgctgaagctggtcgccaaacacgatcccgacaataaatttgctatgccctatatgtgggcgacgaccgggattggctataacgttgataaagttaaagcggtgctgggcgaaaacgcgcccgtcgatagctgggacttgatcctcaaacctgaaaatctggaaaaactgaaaagctgcggtgtctctttcctggatgcgccagaagaagtttttgctaccgtgttgaattatctcggcaaagatcccaacagcactaaagcggatgattacaccggaccggcaacagatctgctgttaaagctgcgcccgaacattcgttatttccatagttctcaatacattaacgacctggcaaacggcgatatttgcgtcgctatcggctgggcaggtgatgtctggcaggcgagtaaccgcgcgaaggaagcgaagaatggcgtgaatgtcagcttcagcattccaaaagaaggggcgatggcgttctttgatgtattcgccatgcctgcggatgccaaaaacaaagacgaagcctatcagttcctgaattacctgctgcgcccggatgtagtagcgcatatttccgaccatgtgttctatgccaacgccaataaagcagccacgccgctggtgagtgcggaagtccgtgagaacccaggtatttatccgcctgcggatgttcgtgcgaagctgttcactctgaaagtgcaggatccgaaaatcgaccgtgtgcgcacccgcgcgtggaccaaagtgaagagcggaaaataatccgcagtcgtagatgccggaggggcgcaccacacccgccggcaattcgcaccattatggtgcgcttgcacacattcaatgccggagagcagccgtgaatgacgctatccctcgcccgcaggcgaaaacccgtaaggcgctgacgccgctattagaaatccgcaacctgaccaaatcctacgatggtcaacatgcggtggatgatgtcagcctgaccatctacaaaggtgaaatcttcgcgctgctgggcgcatccggctgtggcaagtccacgctgctgcgtatgctggcaggtttcgaacaaccttctgccggacagataatgcttgatggcgtcgatttgagtcaggttccgccttacctgcgccccatcaatatgatgtttcagtcttacgcgctgtttccgcatatgaccgtggaacagaacatcgcttttggcctgaaacaggacaaactaccgaaagcggaaattgccagccgggtcaatgagatgctcggcctggtgcatatgcaggagttcgccaaacgcaaaccgcatcagctttccggtggtcagcgacaacgtgtggccctggcccgaagccttgcgaagcgcccgaaactattactgctcgatgagccgatgggcgcgctggataaaaagctgcgtgacaggatgcagcttgaagtggtggatattctggagcgcgtcggtgtgacttgtgtgatggtcacccacgatcaggaagaggcgatgaccatggcggggcgcatcgccattatgaatcgtgggaaatttgtccagattggcgaaccggaagagatctacgagcatccgactacccgctatagcgccgaatttattggcagcgtaaacgtctttgaaggcgtactcaaagagcgtcaggaagatggcctggtgcttgatagcccggggctggtgcatccactgaaagtcgacgcggatgccagcgtggtcgataacgtgccggtacatgtggcgctgcgcccggaaaaaatcatgctttgcgaagagccgcccgccaatggttgtaacttcgcggtgggggaggtgatacacattgcctatctcggcgatcttagcgtgtatcacgttcgtctgaaaagtgggcagatgattagcgcccagctacaaaacgcccatcgtcatcgtaaagggttaccgacctggggcgacgaagtgcgtttgtgctgggaagtggacagctgtgtggtgctgacggtttaaggagcaaagatgagtacacttgaacctgctgcccagagcaaaccgccgggcggatttaagctgtggttgagccagctgcaaatgaagcatgggcgcaaactggtcattgcgttgccatatatctggttgatcttgctgtttctgctgccatttctgattgtctttaaaataagcctggcggagatggcgcgcgctattccaccttataccgaactgatggagtgggctgacgggcaactgtccatcactcttaatctcggtaattttctgcaactgaccgacgatccgctctatttcgatgcttatctccagagcctacaggtggctgcgattagcacattttgctgtttactgatcggctatccgctggcgtgggcggtggcgcacagtaagcctagcacccgtaatattttattactactggtgatcctgccgagctggaccagctttctgatccgcgtttatgcctggatgggaatattaaaaaacaacggtgtgctgaataattttctgctgtggctgggggttatcgatcaaccgctgaccattctgcataccaatctggccgtttatatcggcattgtttacgcttacgtgccgtttatggtactgccgatttataccgcgttgattcgtattgattatagcctggtggaagcagcgctggatctcggtgcacgaccgctgaaaacgttctttactgtgatcgtgccgctgactaaaggtgggattattgccggaagcatgctggtgtttatcccggctgtgggcgagtttgtgatcccggaactgctcggtggcccggacagcatcatgatcgggcgcgtgctatggcaagagtttttcaataaccgcgactggccggtggccagcgcggtagcgatcatcatgttgctgctgctaattgtgccgataatgtggttccacaaacaccagcaaaaaagcgtgggagaacacggatgaataatttaccggtagttcgtagcccctggcggattgtgattttgctgctgggctttacctttctctacgcgccaatgctgatgctggttatctatagctttaacagcagcaagctggtgacggtgtgggccggctggagtacgcgctggtatggtgagttattgcgcgatgacgcgatgatgagtgcggttggtttaagtctgacaattgcggcctgtgcggcgacggcggcggcgatcctcggaactattgcggcggtggtgctggtgcgctttggcaggtttcgcggaagtaatggctttgcctttatgatcaccgcgccgctggtaatgccagatgtcatcacgggcttgagcctgttgttattattcgtcgcgcttgctcatgccattggctggcctgcggaccgcggtatgctcaccatctggctggcgcatgtcactttttgtacggcttatgtggcggtcgttatttctagtagattgcgggaactggatcgcagcatagaagaagcagcgatggatctcggtgcgacgccgctgaaagtgtttttcgtcattacgctaccgatgatcatgcccgcgatcatttctggctggttactggcttttactttgagccttgatgatctggtgatcgccagctttgtttccgggccgggagccaccacgttaccgatgctggtcttttccagcgtgcggatgggggtgaatccggaaatcaacgccctggcaacattgatcctcggcgcggtcggaattgtcggatttatcgcctggtatctgatggctcgcgcagaaaaacagcggatacgcgacatccagcgtgcaagacgtggctgaagacactaaaatttgccaacctggctacataatgccgcgcatgtcgcggcattgttttcatggaagacgaaacgttgggattttttaagaaaacatctagttctcatgctcgcctgaatgtgcctgcgctggtgcaggtggcggcgctcgccattattatgatccgtggcctcgacgtgctgatgattttcaatacgctgggcgtgcgcggtattggcgagttcattcatcgcagcgtacaaacctggagtttaacgctggtctttttaagcagtctggtgctggttttcattgagatctggtgtgcgtttagtctggtgaaagggcgtcgctgggcgcgctggctatatctgctgacacaaatcaccgccgcaagttacttgtgggcggctagcctggggtacggttatccggagctgttcagcattcccggtgaaagtaaacgtgaaatcttccatagcctgatgctgcagaagctgccggatatgctcatcctgatgctgctgttcgttcccagcaccagtcggcggttcttccagttgcaataatgtgtataatcgtcgcccctgatgatgtgaaggtcaatgtatgcagtgcgcactttacgacgcgggtcgctgtcgttcctgtcagtggataatgcagccgattccagagcaactctccgctaaaaccgccgatcttaaaaatctgctcgccgactttccggttgaggaatggtgcgcgccggtgagtggcccggaacaagggtttcgtaataaagccaaaatggtggtgagtggtagcgttgaaaaaccactgctcggtatgctgcatcgcgatggcacaccagaagacctttgtgactgcccgctttatcctgccagttttgcgcccgtttttgcggcgctaaaaccgtttatcgcccgagcggggttaacgccctacaacgtggcgcgtaagcgtggcgaactgaaatacattctgctgactgaaagccagagtgatggaggcatgatgctgcgctttgtactgcgttctgataccaagctggcgcaactgcgtaaggcgctgccgtggttacacgaacaactaccgcagctgaaagttattaccgtcaatattcagccggtacatatggcgattatggaaggggagacggagatctacctgaccgaacaacaggcactggcggagcgttttaatgacgtaccgctgtggatccgtccgcaaagtttcttccagactaatccggcggtcgccagccagttgtacgccaccgcgcgcgactgggtacgacagctgccggttaaacatatgtgggatctgttctgcggtgtggggggctttggtttacactgcgcgacgcctgacatgcagttaaccgggatcgaaattgcaagtgaggccattgcctgtgcaaagcagagtgccgctgaactgggcttaacgcgtttgcaatttcaggcgctggactccactcagtttgccaccgctcagggggatgtgccggagctggtgctggttaacccgccgcgccgcggcattggtaaaccgctgtgtgattatctcagtacgatggcaccgcgttttatcatctactccagctgtaacgcccaaactatggcgaaagatatccgcgaactgcctgggtttcgtattgaacgggtgcagcttttcgatatgttcccgcataccgcgcactatgaagtgctgacgctgctggtgaagcaataaaaaagccgcatgtgcggcttcagattgctgacaaagtgcgcgttgtttatgccggatgcggcgtaaacgccttatccggcctacaaaagcgtgcaaattcaatacattgcatgggccatgtaggcctgataagcgtagcgcatcaggcaattttacctttgtcatcagtctcaagccgcggttgcggctttctgaatcttactgtgggaaccactggtcactgattttttgataagtaccgtcagctttaattgctgccagcgcgttattcagtttttccagcagggctttgttatccggacgtacagcgatgcccaggccggtgccaaaatattgcggatcggtcactttctcagtagcaacaccaagttgtggattggttttcagccattcgtttaccaccgctgtgtcaccaaataccccatcaatacgaccatttttcagatcgataaaggcattctgataactgtcataagagacagttttcacttccgggtgctgatcctgaatatatttctggtgcgtagtaccgttttccatcccaatacgtttgcctttcagatcggcaaacgttttgtaggtatcttttttggcaatcacgacggcactgttttcatagtagggcgtggtaaagcttacctgtttgctacgctccggggtgatatccataccggagattacggcgtcatattttctgaatttcagggacgggatcaggctgtcgaacgcgtgattagtaaaagtacattctgcctgcatttgtttgcacaaggcttttgccagatcgatatcaaagccgacaatctcattattagcacctatagattcaaagggtggataggtggcactaacgccaaaattgattttctctgcggcagaagcaccgaaagtaaaggaagcaagtaaagcggcaagaactaactttttcatgatggaactcccgtctgtcaatcttatgatttttggccgtgtctgcggcatgggataacaatgccatcaagtgaatttatatgcaataaacatgattaaataatttaaatgaaataaaaaagacggacaacttagtgggttgtccgtcttcattataagaatttatgcactatgtaggccggataaggcgtccccgccgcatccggcacaggcaccgtgctgatgtctgatgcgacgctggcgcgtcttatcagacctacaaaaccccccggcgaatgtacgcagccacattaatttcgccgttcgaatgccagcgctttgcgctcgatcagacgcatcatcagcgtcagcaggccgttaacgaccaggtaaataatccctgccgcaccgaacaccattacatcgtaggtgcgtccgtacaacaactggctgtatcccatcacttccatcagcgtaatggtgtatgccagagaggtacttttgaataccagcaccacttcgttggaataagaagagaggctgcgtttaaaggcatacggcagcaggatcgccagcgtatcttttttgctcattcccagggcgctacaggactgccactgaccttccgggatcgcacgaattgcaccgtaaaacagctgcgtggtatacgccgcactattcaggctcaacgcaatcagcgcacataaccacggttcactcaacaaatgccacagtgccggatactcctgcaaagtcggaaactggcccggcccgtaataaatcaggaagatctgcaccagcagcggcgtaccggtaaacagcgtgatataaccccgcaccagccacaccagcaccggcgttttcagcgtcaggatgatggtaaaaatcaatgccagaatcagtgccacaatcaggctggcaacggttagcgtcaggctggtgtgtagccctttcatcagttcgggtaaatactcaaacattagctgggcctccgctcaaaacgtgtcgcgcgcaggtcaatgcgtttgagaatgtactgactgagcagggtgatcaccaggtaaatcgccgccgccacaatgtaccaggtaaatggttcctgggtacgagtagcgatgctttttgtttgcagcattaaatcattcacactaatcaaactgaccagcgcggtatctttcagcagcaccagccactggttaccgaggccaggcagcgcatgacgccacatctgcggcatcaccagacggaaaaagatagcgcttttgctcagccccagcgcctgaccagactcccactgacccaccggcaccgctttcaacgcgccccgaagcgtttggctggcataggcggcatacagcagactcagagcgatgacaccacaaaggaacgggctaacgtcgaagttctcaatgtccatctgcactgggatctgcacgaacccaagattgatagtgaagccatcgctaagcgtcagcagcagctggctggagccaaaatagataaacagcaccaccagaatttctggcaggccacgcagaatggttaccagcgcactacctgcccacgcgacaggacgccattttgcgctctcccataccgcaaagaacatcgccagcgccagcccgacaatcaatgcacaaacggcaaggccgacggtcatcccggcggcgcttgctaaaggaaaaaattcattcatcaggaattacttctggaaccatttgttgtagatggtttcgtaagtgccatctttcttcactttttccagcgcagtgttgagtttctgctgcagctcagtgttgccctgacgtaccgcgatgccgaggccagtgccgaagtaatctttatcggtcactttgtcgcccaccgccgccagtttcgggttatctttcagccactcagtgaccactgcggtgtcaccgaagacgccgtcgatacgcccgttttgcagatccagttttgcgttctggtagctgtcatacggaacggtagtgatttccgggtgcttatccataatgaatttctggtgtgtcgtcccgttctgtacgccgacttttttgcctttcagctgatcaacactggtgtatttgccttgctgacccacaaacagggcagagttgtcatagtacggggtggtaaacagcacctgcttttcacgctccggagtgatatccatgcccgccatcacggcttctacgcgacggaatttcaggcttgggatcaggctgtcaaacgcctggttagagaaagtgcaggttgcatcaatctctttacacagcgcttgtgccaggtcgacgtcaaaaccaacgatctggttgtttgcatcaatgctttcaaacggaggataggaggcttcggtagcaaaacgaatggtttcggcagctgtggcggaaagactaaaacctgcaattaacgcggcaatcagaacttttttcattgttgttatcccgaatcttagtgagagagatagtttttaaatgcttcggtttgcggctcggtaaagcagctcgcgtcgccttgttctacgatatgaccattttccatatacaccactcggctggcggttttacgcgccacttcaacttcgtgggtgacgatcacctgggtaatattcgtttctgccagctcacgaatgatgctgacgatttgtgccgtaatttccgggtccagtgcggcggtcggttcatcgaacagcagtacctgcggttccatcatcaacgcacgggcaatagcaacacgctgctgctgaccaccagaaagatgcagcgggtaacgatcgctataaggtttgagacgcagacgttccagcagtttttctgcacgggccagcgcctgatctttactcaaccccagtacacggcagggcgcttcaatcaggttttgctgcacggtcagatgcggccacaggttgtattgctgaaacaccatgccaacgttacgacgcaaatcgcgaatcgctttgtcagagggtgttttggtgaaatcgaaatggttgcctgcaatgttgagcgtaccggagcgcggcatctcaagcagattgagtacacgcagcaggctgcttttacccgcgccgctggggccaagtaacaccagcgtttcgccctgtgggcaatccagcgtgatatcgaacagcgcctgatgcgcgccgtagaagcaattaatgccgtttaattgaatactcattgacactcgtatactggcagtctgatagctattgaggtcgaagatagtacctttgacagaataattatgcaatatttctgctttaaaagttaaaagcaaagcgcattattcaataaacatagcacaaaataacgggggcggtggtcggcgagcataaatgtcggcattcctcacgaaatgccggacaatttacggggtttattggttgatcaaggcgttagcgattctcgatggactgacggagcgtacccgccgtggcatgaacgctaccgcctaagtaacgcacatcgtcgatgacccaacactggccttcctgaatcattaacacttcatcctgccaaccctggtcaccctgtttgagatccacgcgcaatggaatgttacgggcatcacgattagggatagtgcttgcactggcaacgtgggcgctatctggcaaggtggttcgactggagaatggatcgttggtcagtagttcccgatggttattatcccgggaggcatcgctaagcagtgtcgccagtttgtcgctcagataagggcgcaaggcggtgatgtcgttgctgcggtgcaaaatgcggtagtcataaaattgctgggccacgttatccgggcctccttcaacgcaaggaccactgcgtgtgccgttatctttataagctggagtgactgtggtgcaggcactgaggagcagtgcgcaggggataagcattgtcaatttgctgtagcgcataatgatttccttataagcgatcgctctgaaagcgttctacgataataatgatatcctttcaataatagcgtatcagtctgataatgcttttgagatcgaaggcttagcaaacaaggagatcgatcatgcaattttctacaaccccaactctggaaggccagaccatcgttgaatattgcggtgtggtgaccggcgaagcgattttaggtgccaatattttccgtgatttctttgccggtatccgcgatatcgttggcggacgttccggtgcgtatgaaaaagaactgcgtaaagcacgggagatcgcctttgaggaattaggctcccaggcgcgggcgctgggggccgatgccgtcgtcggtattgatatcgactacgaaacggtcgggcaaaacggcagtatgctgatggttagcgtcagcggtacggcggtgaaaacgcgtcgatgagaagattcttctggctggtcgctgccgctctgttattggcagggtgtgcaggcgaaaaaggcattgtcgagaaagagggatatcagcttgatacccgacgccaggcgcaggcggcgtatccgcgcattaaagtgctggtgatccactacaccgcagatgattttgatagcagcctggcgacactgaccgataagcaggtcagcagccattatctggtccctgcggtaccaccgcgatacaacggtaaaccgcgcatctggcaactggtgccggaacaagaactggcctggcatgcggggattagcgcctggcgcggggcaacgcgccttaacgacacctctattggcattgagctggaaaaccgtggctggcaaaaaagcgccggagtgaaatattttgccccgtttgaaccggcacagattcaggcgcttattccactggcgaaagatattattgcccgttatcacatcaagccggaaaacgtagtggcacatgcggatatcgcaccgcagcgcaaagacgatccggggccattatttccctggcagcaactggcgcagcaggggattggtgcctggccggatgcgcagcgggttaacttttaccttgccgggcgcgcgccgcacacaccggtagataccgcgagtttgctggagcttttggcgcgctacggttatgacgttaaacctgatatgacaccgcgcgagcagcggcgcgtgattatggcattccagatgcatttccgcccgacgttatataacggcgaagcggatgcagaaactcaggcgattgccgaagcattgctggagaaatacgggcaggattaacgcggcagttttccgtggtcgcgtagccaggcggcagttttctcgataccttcatccagggtgatgaccggctgataacctaactcttcctgcgcacgcgtaatatccagcgtaaagtcaaaattcaacttggagacgccgtagtgggtcagcggcggctcttttgcactcttgcggcctaaacgctccatgctgcgggcgatcatatccagcatcgggtaggggacggaacgaatacgacagtcaatattcaactcgtcgatcagcttctgcacgatgctgcgcagtgtgcgatgctcgccgttggtgatgttgtacacacgcccggaaggtagcttatcgcaggcttcctggcttgccagccacattgcgtgcacggcattttcatagtaggtcatatcgaccagcgcactgccgccatgcggtaacagaatactgccgtagtggtgcatcatatgcgccagacggggaataaagactttatcgtgcggtccgaacagactttgtgggcgcagaatagtaaagcgcgtttgtggattcgcctggctaagcatattgatcacttcttcgctggctgctttgctgcgggcaaactcgttggcgaagcggtgagggcgaaaatcttctttaatatcgcgatggtggtgataatcgaagtacagggagggggaagagatatgaataaagttacgcacaccccaggcgacagcccattcacccaggcggcgagtggcgcgaacgttagccagatcgaaagcctgttgtgtcccccagggactggtaaagctggagcagtgccacagcgtatcaatgcccgcgagcatcactttagcttgactactaaccagctcggtcagatccgccggaacaaactctgcgcccattttttccagcaatttgcccattgcctcgttgcgaccggtcgctcgcacgctgatgcctttctggcataaaaactctaccgcgtttcgacctaagccgctggtggcgccggtaaccagtaccttcatatcaatccactgttgttgagaaaataacgtgcgcattcttccgtgatttcccccatgatgcaatgggaaacatgaaagaataacgcaggttttgtcgattaatctgtgctttgttctgccagtctggcgatttgttttgccattccgcgaaaaataaacagatgcgcggggatcatcaataaccagtaaaacagccccggcataccgtgcggatgccagaaagcgcggacatcgatagtacgatagtcgcctttatcttccaggctaaaacacagtcgtcccagccccggcgctttcatgccaaataacaacgtaagttgtttttccggttcaacgacaatcactttccagctatccaccgcatcgccagtctgtaaatattcgcgctccgggcggcctttcgccagcttatgaccgatcgcgcggtccatcaacgcccgtgtctgccacaaaatattgccaaagaaataacgctctttaccgccgatttggttcactacctgccataaagcagcaaggctggcggacgttttaacggtaaaccccgcctgtttggcaaaataaccgtactccggtcgccagcgggcaaaggcctgagcgtcgtagccccagtcgctggagttgaccagtttttcctcctctttcaacgtgctacgtaccgcgtcatcgaaagcgatcagccgttgtgggatgagtgcacgtagcgcggtatcatccgccagcagatcgtgtttcagcccctgaatcaacgccctggcggtggtgggcggtacggaagtaatcacattgagaaaccacacgctaatccagcgggtggggagggggatggggatcaaccagcggcgcttaccgctcaccgccataaaatgttcaaactgttgctgataactgagcacctctggtccggcggcttcgaagatgcggtgttcgctggccggatgatctaacaacgcaaccagatagtgcagcaagttttccagcgcaatgggcgtggtgcgactacgaacccagcgcggaggcgttaagactggcaggttgtagaccatatcgcgcatgacttcgaacgccgcggaacctgcgccaacgataattccggcccgcagttcggtcacgggtacattcgcttcacgcagaatgtccgccgtagcctgacgagcacgcagatgatcgctctgctcatgtggcggggcctgcaagctactaagaaagattaattgcttaactggtacttcacgtagcgcatcgcggacgttgagagccacctggcgctcctgagcgataaaatcgccgccttcgcccatgctgtgcaccagaaaatagaccgtatcgatatcctgcaacagggccggtaggttatccggccagctgagatcgactttatggcaactgacgtttgccagttgcagctttgcaagcctgtcgacatgacgtgccgccgccaggatctgatgcccttgctggctgagtgtgcgcaccagatgctgaccaatgtagccactggcaccgagaactaaaatgcgttgcggcacgtctctctccttaacgcgccaggaatgcacgccagtgggcggcgacttccgccagttgttcgcggctgacgtcaagatgcgtcaccaggcggacaatcgggctggcgttaatcagcacgtttctcgctttcatgtattcgcctaacgcggcagcattttcttccccgacgcgaacaaacagcatattggtgtcctgacgcatcacatccgcgcctgcttcacgcagctgctccgccatccaggcagcgttgtcgtggtcttcctgcaagcgcgcaacgttatttttcagggcatatatcccggcggcagccagaatgccggactggcgcatcccgccacctgtcattttccgccagcgaatggcacgtttaatgtaatcacgattaccgacgagtaaactaccgactggcgtcccaagacctttgctcaggcaaatggtgaagctatcacaatattgcgtgatctctttcagttcgcagccgtaagccaccacggcattaaagatgcgcgcaccgtcaacatgcagcgccagattgcgctcgcgggtaaattcccatgcttctttcaggtattcccgcggcaacactttgccgttgtgggtgttttccagactgagtaatttggtgcgggcgaaatggatatcgtcgggtttgattttcatcgccactttatccagcggtagcgtgccgtcggcagccgcgtctatgggttgcggttgaatactgcccagcaccgccgcgccaccggcttcaaacagatagttatgcgcggcctgaccgacaatatactcttcgccgcgttcgcagtgactgagcagagcgaccaggttggcctgagtgccggtaggcagaaaaatggcggcttctttaccggaaagctctgctgcgtagtcctgcagagcattaacggtagggtcgtctccgtaaacgtcgtccccaaccggggcggccatcatcgcttcgagcatggcgcggcttggtcgggtaacggtatcactgcgtaaatcaatcatggcatgtccttattatgacgggaaatgccaccctttttaccttagccagtttgttttcgccagttcgatcacttcatcaccgcgtccgctgatgattgcgcgcagcatatacaggctgaaacctttggcctgttcgagtttgatctgcggtggaatggctaactcttctttggcgaccaccacatccaccaacaccggaccgtcgatggagaaggcgcgttgcagggcttcatcaacttcagacgctttttctacacggatacccgtaatgccgcacgcttcggcaatgcgggcaaagtttgtgtcgtgtagttcggtgccgtcagtcaaatagccaccagctttcatctccatcgccacaaagcccagcacgctgttgttaaagacgacaattttcactggcagtttcatctgcactacactgaggaaatcgcccatcaacatgctaaaaccgccatcgccgcacatggcgaccacctgacgttctggctctgtcgcctgcgcacccagcgcctgcggcatggcgttagccatgctaccgtggttaaagctacctaacaggcgacgcttgccgttcatttttagataacgtgccgcccacaccgttggcgtaccaacgtcacaggtgaaaatagcgtcatcggcggcaaaatgactaatttgctgcgccagatattgcgggtgaatggctttctcgctcggtttagctaaatcgtccagccctttgcgggcgtcgcggtaatcttccagcgctttatccagaaacttgcgatcggctttttcttccaccaatggaagcaatgcacgcagagtgctcttgatatcgccgaccagtgccatatccaccttgctgtgagcgccgatgctggctgggttgatatcaatctgaatgattttggcatcggtcgggtagaaggcgcggtagggaaattgcgtgccgagtagcactaacgtgtcggcgttcatcatggtatggaaaccactgctgaagccgattaacccggtcattccaacatcatacggattatcgtattcgacatgttctttaccgcgcagggcatgaacaataggcgctttaattttcccggcaaactcaactaactctttatgcgcccccgcgcagccgctgccacacatcagggcgatattgctggaataacgcagcagttgcgccagtttgcgtaactcttcttcttccggcgtcacgactggttgtggcgcatgataccagtgcatggttgccccttctggcgcaggttttaacgccacgtcgcctggtaacacgacaacgctaacgccacggttaagcaccgctttgcgcatggcaatcgccagtacttgtgggatctgctccgggctggaaaccagctcgcaatagtgactacattcgcggaatagctcttgtgggtgggtttcctggaaatagccgctgccaatttcgctggagggaatatgagcggcaatcgccagtaccggaacgtgattgcggtggcaatcgaacaggccgttgattaagtgcaggttgccggggccgcagcttccggcgcagaccgccagttctccgctaagttgtgcttcagcgccagcggcaaaggccgccacttcttcgtggcgggtggacatccactcgatggtgcccatgcgattaagactgtcactaagaccgttcagagagtcgcctgtgactccccagatgcgtttcacccctgcgctttcgagtgttttggcgatataagctgcaaccgtttgtttcatggttctccatctcctgaatgtgataacggtaacaagtttagttcatctgacggagggggaagggatgggagagaaaggaggcactaacggttaaatagcccgatgaaaggaatatcatcgggcataaggcgattatgcgagaaccaaatccccctgcggatggcaggagcaggccagtacgtaaccttcagcgatttcggcgtcggtcagcgtcattgtgctgctcaccgtatattcaccggaaaccacttttgtcttacagcagccgcaaacacccgcacggcaggcagcgacaaccggaacgttattgctttccagcgcctccagtagcgtggtgccaaccggggcgtaaaattctcgtgccggttgcagtttggtgaatttcagaccgctggtcgccgcttctgctactggggtgaagaatttctctttaaagaaacgcgtcacgccgagcgctttcacttcctgctctacccaatccatatacggagccgggccgcaggtcatcacggtacgactagctaagtcaggtacacctgccagcagttcgcgagtgagacgaccagcgataaagccttcggtaacgttattttctgccaccagcgttaccggatagttacgccactcatcggcgaaaataacatcctgcggcgtacgcacgttgtagatcacccgcacatcggcctgtggacggttcttcgcaagccagcgacgcatgctcataatcggcgtgacgccgcagcctgccgccagcaacaggaatttatcttctgctttatcgtcgcaggtaaattcccccatcgcgtcgctaagccagagataatcaccgcgttttacatcgcgcgtcagccactgggagccgacaccgtcatcaatccgccgcacggtcagggtgatatattcactcacgcctggcgtggaggaaatggtgtaagcacgcagcgtttccgcactgtttcgcacgctgaccagtgcatattgcccggcgcgatatgggtagtaatcgtggcaaatcagggaaatcgtccacacatccggcgtttcttgcgtaatgtgatgaacctgcatccgccacgggcattgattcgttggcatcgtcatcgacaaactccttacgcgctcaacagttgcttcatgtcttcttcaacagtggtgatagaacgcaggccgaatttctcgttcagcaccgccagcaggtctggtgtcaggaaaccaggtgcagtcgggccggtgacgatatttttcacgcccagagaaagcagcgtcagcagaatgacgatcgctttctgttcaaaccaggagagcaccaggctcagcggcagatcgttgacaccgcagcccagtttctctgccagagtgacagccagaataatcgcactgtaagcatcgttacattgacctgcatctaccagacgcggcagaccttcgatatcgccaaactcaagtttgttaaagcgatatttaccacaggcgagggtcaggatcaggcagtcatccggcacgctggtggcgaaatcggtgaagtagtggcgctcgccgcgtgcgccgtcacagccaccaagcaggaagatatgacgcagtttttcacggctcaccagatcaatcagcgtatcagcagcgccaagcagcgtctggcgaccaaaacccacggtgataaggtgcggaatttcgctgtacgggaagcctgccatctgttgcgcctgggtgataaccgcagagaaatcatcaccgtccagatgacgcacgccaggccagccaacaatgctgcgggtccagatacgatcgtcataagcgcctacggttgggtcgatgatgcagttgctggtcatcacgatggggccagggaaacgagcgaactccacttgctgattctgccagccgctgccgtagttaccgaccagatgcttgaatttacgcagctccgggtagccatgcgcaggcagcatttcgccgtgggtgtagacattaacgcccgtgccttcggtctgttccagcaggttgtagagatctttgagatcgtgaccggaaatcagaatgcatttacccgccgtcgctttgacgttgacctgggttggcgtcgggtgaccgtatttaccggtttcgcctgcatccagaatgctcatcactttgaagttcatctggccgatttccatactacactcaagaagcgcgttcatatcggcaggccaggtccccagccacgccatgattttatggtactgggcataaatatcgttgtcgtattgaccgagaacatgcgcgtgttccatataggccgccgcacctttcaggccatacaggcacagcagacgcaggccgagaatgttttcgccaatcgccgctttatctttgttaggggtaaattctgctgcctgacgttgcagctcgccgagatcgtcgctcaccagttgcaggtcagccatcgggttatcgacgcgcgcgttggcatctacagccaggcattgcgctttcagcgcctcgcgcagggcaatcgcttcacgagcgtagccgacaatacgcggagaatcgaagttaacgttggtcagggtactgaaaaaggcacgtggcgcgaagctgtcaacatcgtggttgatgatgccgtattcacgcgcttttaccgcccaggcagaaagcccttgcagcgccgcgatgagtaaatcctgaaggtcagaagtttccgccgttttaccacacatcccctgcgcgtaactgcagccgtttcctgccggagtacggatagtttgttcacattgcacacaaaacatgatcacaccttttaaagttatatttaatatacatgtttaaggttaagacgcttaacgcggggataaaagggatttttcatgcaactttaagggagattgatttagcgcaattttggcggcagggatctaccgccagagaggtattacgcagagaaaaaggcgatgaggatcggcactaacaggctaagaataaaaccgtgaacaattgccgccgggaccatatccagcccgccagtacgttgaagaacgggcagggtgaaatccatacttgtggcaccgcataagcccagtgcagtagagcggctgcggcgaatcagcccagggatcaacataatagcaatcagttcacgggccagatcattaaaaaacgccgcgctcccgattaccggaccaaaagattcggtcaataaaataccggaaagagaataccagccgaaaccggaggccattgccagcgcggtattgatggggagatcaagaataaaggcgttaattaaaccaccaattaaactactgacaaccaccaccacggcgacaatcattccccggcgattaaggacaatctgctttaaggtcatgccattattgcgcaactgaataccaacgaggaaaagtagcaaaattaacgtgtattcactggcttcggtcgcgtgttgtaagaaagccagtccacttagaccaatggcaaaaccaatcactactacgccgcacagttttaggctctccagcgccatcgcaatacggctcgggagtttttcttgctgatggtggttgcgccacggcaggcctcgctccagccacatcagggcggcaatattacacagtaaaataacggtaatactgacggcagaataatgcagaatcgccaacaggttactggcgaggttatcgagaaacgccagactgatacccataaaaaagagaataaggtaaaccatccagcttaatagctgattaataacttttaacgcagcttgttggcgaagcggaatgaggtaacccacaatcaggggaaccagaatgattaacagcccagaaaacatgaaaacccagtccttgcaaagatgaagtcgaaatgcgcgatgacacactactgaaagcggaaggacgagtaaagttgcaattaaaaggaaatgttatgcataaggagcagtagagtattcgttttcatttaaagatattcttgcgctttaattacaaactgcaccgatgttggtggcgtcaaaatcgccgaggcgttccctgaaggccggggcagcccacatggatgtgggctgagggcgcgttttacagggatgttacctcgcgcccgacccggtagccgtaagggataagtcgagggcaccgcgcagcggcgattttgttcgccagagcccgggggtgcagggggcggcggcgattggccgccccctgcgcgctccttgcgccagtggcaatatgttgcttagctcatgaaaggagcgcaacaagatgatgaatcaacatataacaacatcttaaaaaaaggcctgacattacgccaggccttctgcgttaattaatcacgcttttccagcagggtccggtaaatcagaccaccgataatgccgccgacaattggcaccacccagaagaaccacagttgttctaatgcccagccgccctggaagatagcaaccgcggtgctgcgcgccgggttaacagaagtgttagtcaccggaatactaattaagtgaatcagggttaaggccagaccaatagcgatcggcgcaaaacctgccggcgcgaatttgtcggttgcgccgtggatcaccaacaggaaacctgcactcaataccagttcaactaccagcgcggaaagcatggaataaccgcctggactatgctcgccataaccgttagaagcaaaaccgctggctgccgcgtcaaaacccgttttaccactggcaattaaatacagcagcgccgctgcaacaataccgccgacaacctgggcaattacgtagccaacgacttcttttgccggaaaacgtccgccagcccataaaccaatagtgaccgccgggttaaaatgaccaccagaaatatgaccaacagcaaaggccatcgtcagaacggtcagaccgaacgccaacgccacgccggcaaaaccaatgcctaattccgggaagcctgcggccagtacagcactaccacagccaccaaaaacaagccagaaagtaccaaaacattcagctgctaattttctgaacatatccaccacaattaaaaattgaccctgtgaaaaatatggtcgttttatagggtcgtcgtaaaaaagtgacgacggaaataatgcgcggctattttaaaaacgaaggcgagtcattcaccagataaataaatccagtaaatttgatttagggcaacagcgggttgccccatatagtcatttgtctgattgacagtgtagtgcacgcaaaagatttaatcctttaggcgtaataaaaaataatttatcatgctaattatttgattttgttgtttttgcagacttatcagcaagagggagtataacgcgattattcgctcatttttcagacatttgccatgcttaaatgtgatgtcatcacgtattagcaaggcctttcccgttatactgccagcgtaaaggataagtcacatatttctggaggggatatgattcttgagcgcgttgaaattgtgggttttcgcggtatcaaccgtttgagcttgatgctggaacaaaacaacgtcctgattggggagaacgcgtggggtaaatccagcttgctggacgccttaactctgctgctaagcccagaaagtgatctctaccattttgagcgcgacgatttctggttcccgccgggagatatcaacgggcgagaacatcatctgcatattattttgaccttccgcgaaagcctgccaggccgacatcgggttcgccgttatcggccgctggaagcgtgctggacgccatgcaccgatggctatcaccgtattttttatcgtctggaaggggagagtgcggaagacggcagcgtgatgacactgcgcagttttctcgataaagacggacatccgattgatgtcgaggatattaacgatcaggcacgccatctggtgcgtttaatgccggtgctgcgcttgcgtgatgcccgttttatgcgccgtattcgtaacggcacggtgccaaatgtccctaatgtggaagtcaccgcgcgccagctcgatttcctcgcccgtgagttatccagtcatccgcaaaatctctctgatgggcagattcgtcagggactttccgcaatggtacagctgcttgagcattatttctctgagcagggggccggacaggcgcgatatcgtttaatgcggcggcgagccagcaatgagcaacgaagctggcgctatctggatatcatcaaccggatgattgaccgacctggtgggcgcagctatcgggttattttgctcggcctatttgctactttgttgcaggcaaaaggcacattgcgactggataaagacgcccgtccattgttgctgatcgaagatccagaaacccgtttacaccccattatgcttagtgttgcctggcatctgttgaatcttctgccattgcagcgcattgccaccaccaacagcggtgagttgcttagcttaacgccggtagagcatgtttgccgactggtacgtgagtccagccgcgttgccgcctggcgtctggggccgagtggcttgagtaccgaagatagccgacgcatatcctttcacattcgttttaaccgtccgagtagcctgtttgcacgctgctggttgctggtggaaggggaaacggaaacctgggttatcaatgaactggcgcgtcagtgcggacatcattttgatgccgaagggatcaaggtcattgagtttgcccagtccgggctaaagccactggttaaatttgcccgccgaatggggattgaatggcatgtactggtcgatggcgatgaagcagggaagaaatatgccgctacggtacgcagcctgttgaataacgatcgggaagccgaacgagaacatttaacggcgttaccggcgctggatatggaacattttatgtatcgccagggattttccgatgtgttccaccgcatggcgcaaatcccggaaaatgtaccgatgaatctacgcaaaattatcagcaaagcgatccatcgctcttccaaacccgatcttgccattgaagtggcaatggaggcaggacgtcgtggtgtggactccgtaccgacgctgctgaaaaaaatgttcagtcgcgtgctgtggctggcgcgcggtcgcgcggattaaccgcgaaacatcgtggccatttgtggctgaatagcgtcgagcatctcatagcgccgacggtattcagcccgttttttactggcgatttcggcaatctcttttcgtgctatctgtgctggaaggcggtaatggcgttcagcatcacatacgccgccaacgctttcccagaaagcgttgtaatcagcgtggatcttgccttctttatcgcgataacgcaggctgcggtaaatatgcgtttcattgctgacggcaataatctgctctacctgcaaacgttgggcaaacagacaggccgcttccatcacgaggcgtttgggaaatagcccgtggcaggctttcgtcgcattctggatttcctgatgtggaatttcccattttgcgccttgcagtccgccaataaacatcgttcttttcccctgatattcacacagggtaaacgtgatctctgccagaggaataccttcgctgttgcggaacaggattgtgctgtcaccttctttatccatactgatcatcatggtcagctcaagcgtgaactgctcgccgtttttgccttccagcttcgccagttgcagcccgggggtattcaaatataagctgaattcttccgcgctcatacattcgcggagtaacgcataatggtaacgtaacgcctccagcaattgcttacggctaagattcgccgcaaggtaagggcgatgcagacgcacaggcagtcgcggctggcgcgttaacaatacattgagattaggccagtgggaaagttcgttcatccactcaacgcttaaacgcggcataatcaagctgcgcagcaaaaatttctggcgaaaactacggcgatgccagaatttacccggccgacactgtccacgtgccagactaagaaaaagactcaggctgctgagagattcagatggcgtaaaggtccgttcagttagctggctcatattcatgaaatcaatggttatacatggcgtgcttttcaccattgcgtatcttaaccaaacatcaatagtgtgattactaacgtaaattttagggttttgttgatatttcgttgaagttaatgacccggattggcatatggagtattcagaaaatttatgaaaaagcggaaaaccgtgaagaagcgttacgttattgcgctggtgatagtcatcgccggactgattacgttatggagaattcttaacgcacccgtgccgacttatcagacgctgattgtgcgccccggtgatttacagcaaagcgtgctggcgaccggaaagctggacgcgctgcgtaaggttgatgtgggcgcgcaggtcagcggtcagttgaaaactctgagcgtggcgattggcgataaagtaaaaaaagaccagcttttaggggttattgatcctgaacaggctgaaaaccagattaaggaggtcgaagcaacgctgatggagctacgtgcgcagcggcagcaggcggaagcggagctgaaactggcgcgggtgacgtattcccgtcagcaacgtctggcacaaacgaaggctgttagtcagcaggatctcgacaccgccgcgacggagatggctgtgaaacaggcgcaaattggcaccattgacgcgcaaatcaagcgcaatcaggcttctctcgatacggctaaaaccaatctcgattacactcgcatcgttgccccgatggccggggaagtcacgcaaatcaccactctgcaaggccagacggtgattgccgcacaacaagcaccgaacattctgacgctggcagatatgagcgccatgctggtaaaagcgcaggtttctgaagcggatgtaatccacctgaagccggggcaaaaagcctggtttacggtgcttggcgatccactgacgcgctacgaggggcaaatcaaggatgtactaccgacgccggaaaaggttaacgacgctattttctattacgcccgttttgaagtccccaaccccaatggtttgctgcggctggatatgactgcgcaagtgcatattcagctcaccgatgtgaaaaatgtgctgacgatccctctgagcgcgttaggcgatccggttggcgataatcgttataaagtcaaattgttgcgtaatggtgaaacacgcgagcgtgaagtgacgattggcgcacgtaacgataccgatgttgagattgtcaaagggcttgaagcgggcgatgaagtggtgattggtgaggccaaaccaggagctgcacaatgacgcctttgctcgaattaaaggatattcgtcgcagctatcctgccggtgatgagcaggttgaggtgctgaagggcatcagcctcgatatttatgcgggtgagatggtcgcgattgttggcgctagcggttccggtaaaagcaccctgatgaatattctcggctgtctggataaggccaccagcggcacctatcgcgtcgccggtcaggatgttgccacgctggacgccgatgcgctggcgcaactgcgccgcgagcatttcggctttattttccagcgttaccatttgcttagccatttaaccgccgagcagaacgttgaagtacccgccgtctatgctggtcttgagcggaaacagcgactgcttcgtgcccaggagttgctgcaacggctggggctggaagaccgtacagagtattatccggcacagcttagcggtggtcagcaacagcgcgtcagcatcgcgcgggcattgatgaacggtggtcaggtaattcttgccgatgaaccaaccggcgcactggacagccattctggcgaagaggtgatggcgatcctgcatcagctgcgcgatcgtgggcatacggtgattatcgtcacccacgatccgcaggtcgctgctcaggccgagcgggtgatcgaaattcgcgacggcgaaattgtgcgcaatcctcccgccattgaaaaagtgaatgttactggcgggacggaacctgttgtcaacacggtgtctggctggcggcagtttgtcagcggttttaacgaggcgctgacgatggcatggcgggcgctggcagcgaataaaatgcgtactttactgaccatgctggggattattatcggtattgcgagcgtggtttccattgtcgtggtgggtgacgccgccaaacaaatggtgctggcggatattcgttctattggtacgaatactattgatgtctatcccgggaaagattttggcgatgacgatccgcaatatcagcaggcgctgaagtacgacgacttaatcgccatccaaaaacaaccgtgggtcgccagtgccacacctgccgtcagccaaaacctgcgcctgcgttataacaatgttgatgttgctgccagtgccaatggcgtgagcggcgattattttaatgtctatggcatgaccttcagtgaaggaaacacctttaatcaggagcagctgaacggtcgtgcgcaggtcgtggttctcgacagtaatactcgccgccagcttttcccccataaagcagatgtggttggcgaggtgattctggtcggcaatatgcccgccagagtcattggtgtggcggaagaaaaacagagcatgtttggtagcagtaaagtgctgcgtgtctggctaccttacagcacgatgtccgggcgagttatgggccagagctggcttaactccattactgtcagggtgaaagaaggatttgacagcgccgaggcggaacagcaactcacgcgtttacttagtctgcgccacggaaagaaggatttctttacctggaacatggacggcgtcttgaaaactgttgaaaagaccacacgtactttacaactgtttctgacgctggtggcggtgattagcctggtggtgggcggtattggtgtaatgaatattatgctggtgagtgtgaccgagcggacgcgggaaattggcattcgcatggctgtaggtgcgcgagcaagcgatgttttgcaacagttcctgatcgaagccgtactggtttgcctggtcggtggcgcgttgggaataacactgagtctgttaattgctttcaccttgcagcttttcttacccggctgggagattggttttagtccgttggcgctgctgctggcgtttctctgcagcacggtcaccgggattttatttggctggttacccgcacgaaatgcggcacgactggatccagtagatgctctggcacgagagtaatttttgagataaaaatgccagccgatcgggctggcattttgcctttaggatgtacacaatgagacagaagagttatgcgactgccgcttctacttcgacgggcacaataacactggcgtgattgccttttggcccctggtggacatcaaactgaacggattgtccagcttttagcgttctgtaaccatccatctgaatggtggaataatgagcgaaaatatcttcgccgccgccttcagggcagatgaaaccaaaccctttggcattgttgaaccacttaacagtacccttttccatgcttcgacatccttcgcaaatcttatacaagtaagatggaataaaccggggtcagagagggggctgttcaaaacctcgccaactctagaaatacaatttagagaattagggcgagccgtcaagcatttgacaggggacaaggggcaggtatgaatcaaaaatttgaagcagttaacgctattgacaggaatgtgacagatgtcgctgatgccaacgatagatgatagttatctatcatgtggagtagattggtcaggcaaataagctcttgtcagcggcagggcgttctgccgataaccgtaaccgaagatgataactgacaatgggtaaaacgaacgactggctggactttgatcaactggcggaagaaaaagttcgcgacgcgctaaaaccgccatctatgtataaagtgatattagtcaatgatgattacactccgatggagtttgttattgacgtgttacaaaaattcttttcttatgatgtagaacgtgcaacgcaattgatgctcgctgttcactaccaggggaaggccatttgcggagtctttaccgccgaggttgcagaaaccaaagtggcgatggtgaacaagtacgcgagggagaatgagcatccattgctgtgtacgctagaaaaagcctgaatgcaggcataaaaattgggggaggtgcctatgctcaatcaagaactggaactcagtttaaatatggctttcgccagagcgcgcgagcaccgtcatgagtttatgaccgtcgagcacttgttactggcgctgctcagtaacccatctgcccgggaggcgctggaagcgtgttctgtggatttggttgcgctccgtcaggaactggaagcctttattgaacaaaccacacccgttctgcctgccagtgaagaggagcgcgacacacagccgacgctgagttttcagcgtgtactgcaacgtgcggtcttccatgtccagtcctccggtcgcaatgaggttaccggtgcaaacgttctggtcgctatctttagcgaacaggagagccaggcggcatatctgttgcgtaaacatgaagtcagccgtctcgatgtggtgaactttatctctcatggcacgcgtaaagacgagccgacacagtcttctgatcctggcagccagccaaacagcgaagaacaagctggtggggaggaacgtatggagaatttcacgacgaacctgaatcagcttgcgcgcgtgggcggaatcgacccactgattggtcgtgagaaggagctggagcgtgctattcaggttctctgccgtcgccgtaaaaacaacccgctgctggtgggggaatctggtgtcggtaaaaccgcgattgcggaaggtcttgcctggcgaattgttcagggcgatgtgccggaagtgatggctgactgtacgatttactctctcgatatcggttctctgttagcgggcacaaaatatcgcggcgactttgaaaaacgttttaaagcgttgctcaagcagctggagcaggacactaacagcatcctgtttattgatgagatccacaccattatcggtgcgggtgcagcgtctggtggtcaggtcgatgcggctaacctaatcaaaccgttgctctccagcggtaaaattcgtgtaattggtagcacaacctatcaggagttcagcaacattttcgagaaagaccgtgctctggcgcgtcgcttccagaaaattgatattactgaaccgagcatcgaagaaactgttcaaatcatcaatggcctgaaaccgaagtatgaagcgcaccacgacgtgcgttataccgcaaaagcggtgcgtgcggcggtagagctggcggtgaaatacattaacgatcgtcatctgccggataaagccattgatgttatcgacgaagcgggcgctcgcgcacgcctgatgccggtaagcaaacgcaagaaaaccgttaatgtggcggatattgagtccgtggtggcccgtattgcacgcattccagagaagagtgtttctcagagtgatcgtgataccctgaaaaacctcggcgatcgcttgaaaatgctggtcttcggtcaggataaagccattgaggcgctgactgaagccattaagatggcgcgtgcaggtttaggtcacgaacataaaccggttggtagcttcctgtttgccggccctaccggggtcgggaaaacagaggtgacggtacagcttagcaaagctttgggcattgagcttctgcgctttgatatgtccgagtatatggaacgccataccgtcagccgtcttattggtgcgcctccgggatacgttggttttgatcagggcggtttgctgactgatgcggtcatcaagcatccacatgcggtgctgctgctggacgaaatcgagaaagcgcacccggacgtgttcaatattctgttgcaggtgatggataacggtacgctgaccgataacaacggacgcaaagcagacttccgtaacgtggtgctggtgatgaccaccaacgccggggtacgggaaactgagcgcaaatccattggtcttatccaccaggataacagcaccgatgcgatggaagagatcaagaagatctttacaccggaattccgtaaccgtctcgacaacattatctggtttgatcatctgagtaccgacgtgatccatcaggtggtggataaattcatcgtcgagttgcaggttcagctggatcagaaaggtgtttctctggaagtgagccaggaagcgcgtaactggctggccgagaaaggttacgaccgggcaatgggcgctcgtccgatggcgcgtgtcatccaggacaacctgaaaaaaccgctcgccaacgaactgctgtttggtagcctggtggacggcggtcaggtcaccgtcgcgctggataaagagaaaaatgagctgacttacggattccagagtgcacaaaagcacaaggcggaagcagcgcattaatctgattgttaggtaggttggtcaagtccgtaatctcgaaagaggttacggactttttgtttatggggtggaggaggttcagaccctttttttaatgatgatggtaagttgttgataattagtgctgcgggaaggtaaggataaaaaagggtgctgcaggagaatgggatggttttgctttattaacaacgggctaaacgtgtagtatttgagttcactgccgtacaggcagcttagaaattcacaggtaacatactccacccgcccaccatgttcactgccgtacagacagataaaatgcgaaaaaaaagctcgcactttcgtacgagctcttctttaaatatggcggtgagggggggattcgaacccccgatacgttgccgtatacacactttccaggcgtgctccttcagccactcggacacctcaccaaattgttttgctaccaaacctcatgggtggcaacggggcgctactatagggagttggagtaaaacggtcaagaagaattttaatgataattattgtttgctcatactgtaaacaagttgtgcagtatatctacatcgagacaagttacggacttatacttccaaagtacttcatacatatcacaaaataaaaaggccggttaaaccgaccttttactcgttctttctcttcgcccatcaggcggtaaaacaatcagcgactacggaagacaatgcggcctttgctcaggtcgtacggggtcagttcaacagtcactttgtcgcccgtcaggatgcggatgtagtttttgcgcattttaccggagatgtgtgcagtaaccacgtgaccgttttctaactctacgcggaacatggtattaggcaacgtttcaagaacggtaccttgcatttcaatattgtcttctttggccatctaatcctctggggtatcactaccgtaatttgaaccggcaagataatgccgaagttctgtaaataagtaaagatttgcgcgctaaatcgcaacaaacaggttcggcacattactccgaaaacacacggctaagccgcaccaaaagcgcaacgtataagggagcggtgagataaacgatgggcgttacctgacgcgaaaaattccttatcggcagcggggtaatgagcgtaaccaactctgcgaccgcaattataacactctggggagaaatgtgccgaaaacattcattcttgtggactaaacaagcatcgtggtacccagaaattattcggcaatcgtccgaggcgcatttgattgagataattaaggtaatcccggcggggaatttcgcaggcaccaaggcttgctgtgtgatcgttaaggacctggcagtcgataagcttaccgccatgaccgataaattcctcacagaataccagaagcgccgttttagacgcattttccatccggctgaacatggactcgccacaaaatagcgttccctgggccacgccgtacataccgccgacaagctcatcttcacgccagacttcaatggagtgggcatggccgagttcgtgaaggcgatggtaggcttcgaccacgccacgcgtgatccaggttccttcttcgcgatcgctggcacagccttcaatgacctgaccaaaagcgtaattcatcgtgacacgataggggctgcgtttatgaaatcgcttcatactacggctgatatgcagactttctggccatagcaccgcgcggggatcggggctccaccagaggatggggtcgcctggagaaaaccacggaaaaataccacgctggtaagccattaacaggcgcgcagggctaagatcgcccccaagtgccagcaggccgttaggctcacgtaatgcgccttccggggaagggaaggctatactatggcgagaaagctgaaccaggcgcatgaccgcaaaactccacgcaagtcggatcgttcaataatagcttacaaaccctgcttgaactggtaataacgcccctgtctggcaagcagttctgcgtgagtaccttgctcaataatttgcccgttgtccatcactattatttgttggaaacgagagagtccgcgaagtcgatgggtgaccattaacaccgttttctcacgcatcatttctgcaagcaattcaaggatctggctttcggttgtggcatctaagccttcggtaggttcatccagcaacaccagtggcgcatcatgtaacagcgcacgggcgatagccagacggcgcagttcaccaccggagagctggcgtccgccttcacctaaccaactgttgagacctgcatcctcgagcagcttttccaggccaacgcgacgcaagatctcgctcagagcctcatcactactgccagggctggcgagtaaaagattatcacgcagcgtggcgctaaacagatgcactcgctgaggaacaacgctgatggtctgtcgtagagccgcttcattcaggctggctatggggctatcgttaagcaaaatctcgccctgttgcgggtcccatgcgcgggtcagctgttgtaacagtgtacttttgccgcatccggttcgcccgagaatcgctatatgttccccggcgtttacctgaagagaaatccctttaagtgcctgttgagattgctccggataagtgaactgaacatcccgtaacgtcaggctaacgcgatcggcaacacgagtttgggtatcaggaaaggtgacctccggtttttgatccgttaagtcagagatacgtacggcagaggcaatgacttgccccagatgctgaaatgcacccgttactggtgccagtgcttcaaacgcggctaacgcgcagaagacaaacagggcaattaacgcgccgggttgagcattgccgccaacgccgccagacgccatccacagcatcaggatcaccgctaacgcgccaatgagcagcattatcgcttggctcaatgcggtcagttcagattgacggcgttgcgcttccagccattgaatttctgtattctctagttgcgtgcgataacgatcgctggcaccaaaaatggtcagctcagcttgcccttgcagccaggccgtcagttgttggcgatactgtccgcgaagatgagtcagattttgcccggtgctttttcccgcacgataaaacagcggtggcatcaggaaaagcgtcagtaacataatgccgcccagcgtaaaggcgagggtgaaatcaaggaaacttaacccgattgtcaccaccataatcaccacaaaagcgcccaccagcgggctgataacgcgcaggtaaagatgatcgagcgtatcaacatccgccaccacgcgattgagcaattcgccctgacgatagcgcgccagtccggcaggggagaggggcagcaatttgctgaaggtgtaaatgcgcagatgctgcaacacgcggaaagtcgcgtcgtgacttaccagacgttcaaaatagcgcccggcagtacgggtgattgctgcgccacgcacgcccgcagcgggtagcatatagttgaagctgtacagtccggcaacccccgcaaccgcactggcgctgaggaaccagccggaaagtgtcaacagaccgatactggcgagcagcgtcacaattgccagcacaataccaagacttaacatccatttatgacgtttatacagtgccagatagggtagcaaagcgcgcatttaaatctcctcctgacgatgggccagtaatgtggcgaatgggccaccagccacacttaattccgcgtaacgtccttgctcaataatccggccatcctgcataacccaaatgacatcccagtcagcaagatcttctaactggtgggtgaccattaacgttgtctggcgcagagaggcggcattcagcgcctccattacgcgctgttcactgtgagcatcaaggctggcagcgggttcatccaacagtaataggctacagggatttagtaacgcacgggccaccgccacgcgctgcgcctgccccacggaaaggcgggcagcctggtcgccaacaggcgtatcaacgccttgtgggaggagcggtagaaactcgctgacccaggcgttatccagcgctgcttgtaattcttgttcgctggcatcaggtcgcgccagtagtacgttatcccgcaatgttgctgccggtaattgtgggttttgcccaacccaggagagatgtttacgccaactttctggacttaaatcgcgtaattctatcccgttgattcgtaggcttccctgataactgagaaaaccagaaagcgcgttcagcagactgcttttaccactaccgctgcgaccaaccaacaccgcacgttggcctgctggcaaagtaaagttcagcggtccggccagcgttttaccttccgggctcgtgataaacagctcctcggcctcaatggtcaccggatcggtgcttgctaattccgcctcaccacgttgcggatgggcgagcggggtttccataaacgttttcagactgtcagctgcgccaacagcctgggctttagcatgataaaacgtaccgagatcgcgtaatggctggaaaaactctggcgcaaggatcagggccagaaaacccgcagccagcgtcacaccggtatcgtagtgaccaaaatccagctcgccgagataggaaaaaccaaagtagaccgccaccagagcaatactcaggctggtaaaaaattcgagaatgccggaggataaaaacgccagccgtagcacttccattgtccgttggcggaaatcttcgctagcagaacgaatactttcaatttcagcttcaccacgaccaaaaatacgcaatgtttccatgccgcgcaggcgatcgaggaaatgcccacttaagcgagcaagagcgagaaagttacgtcggttagcatcggcagcccccattccaaccagcgccataaacaacggaattaacggtgcagtgcccagcagaatgagcgccgcagcccagttagaggggaagattgccaccacaatcagcaacggcacgctcactgccagcgccatttgcggcagatagcgtgcatagtaatcatgcatatcgtcaatttgctcgagtaccagcgtcgcccagctccccgcaggtttaccctgaatccacgctggccctgcttgttgcagacggtcgagaacctgacggcggatggcaaagcggatatgctgcccggcgtgataacccacccgttcgcgtaaccagaccacccatgcgcgcagtacaaaggtcagaaccagtaacgtaaagggaagcagcagggcttcacggggaatattctccataatcatatgttgcagaattcgcgccatgaaccaggcctgggcaatgatcaatatgccgctcacaaagcccagcagacgagaaatattcagccaacgttgggagatgacgctttgctgttttaaccagcgggttaactctttttgacgagatttattcattgcacgcttagcaggtgagttatcagaattatttgcagagcaatgttacaacggggaaaaaataaaggcgacccatagtcgcatggtgtcgccttctttacttttgttactgatttgtaaaattattttgcgtcagctaaaccatcgaggtagcgttccgcatcaagtgctgccatgcagcctgtaccggcgctagtaatggcctggcgataaatgtgatccatcacgtcgcctgcggcaaagacgccaggaatgctggtctgggtggcattaccatgaataccgctctgtactttgatgtagccgttttccagttccagctgcccttcgaaaatcgcagtattcgggctgtgaccgatagcaacaaacagaccggcaacgtcgagactctcgatgttatcgctgttttgcgtatcgcgcagacgaacgccagtgacacccatttgatcgccggtcacttcttccagcgtacggttggtgtgcagaatgatgttgccgttctccactttatccatcaggcgcttaatgaggattttttccgcgcggaaaccgtcacggcggtgaatcagatgcacttcgctagcgatgttagacagatacagcgcctcttcaaccgcggtattgccgccgccgatgaccgcaactttctggttgcgatagaagaaaccgtcgcaggttgcacaagcagaaaccccacggcctttaaaggcttcttcagagggcaggccgagatagcgtgcagaagctccggtggcaataatcagcgcgtcgcaagtgtattcgccgttatcgccattcagacggaacggacggttttgcagatccaccttgttgatatgatcaaaaatgatctcagtttcaaacttggtggcatgttcgtgcatgcgctccattaataacggaccggtcagatcgtttggatcgccaggccagttttccacttccgtggtggtggtcagttggccgcctttttccatgccggtaatcagcacaggttgcaggttggcgcgcgccgcgtagacagcagcggtgtatcccgccgggccactacccaggataagcagtttactgtgtttggtcgtgcccatgagatccccatagttgttggcagacaatgggcaggattgtagggaatttacagacgtaaaaaaagagtatgacgattttgttaacaatttgtgcaatcggcagcatcgataagcaggtcaaattctcccgtcattatcacctctgctacttaaatttcccgctttataagccgattaaatgatgaataaacgcccctgttaatgaatatctggcatgttgtactaaaaatcgatgttttgctttgacaatcccctggtgttttgcgaaaacattcgaggaagaaaaaaaacagtattcttatatgcgcataaccatgcatgtaaataccatgtttaccgtgctagtgaaatctacgtatggcgtggacagacgccattcgtgatgtcgatagctgccacaaggcaacggtcttctcaccgtagacccaggcattgcgcgccgtgaatcttcatgatttcggtctatcgtgacgggtagcgactctgaacagtgatgtttcagggtcagacaggagtagggaaggaatacagagagacaataataatggtagatagcaagaagcgccctggcaaagatctcgaccgtatcgatcgtaacattcttaatgagttgcaaaaggatgggcgtatttctaacgtcgagctttctaaacgtgtgggactttccccaacgccgtgccttgagcgtgtgcgtcggctggaaagacaagggtttattcagggctatacggcgctgcttaacccccattatctggatgcaagtcttctggtattcgttgagattactctgaatcgtggcgcaccggatgtgtttgaacaattcaataccgctgtacaaaaacttgaagaaattcaggagtgtcatttagtatccggtgatttcgactacctgttgaaaacacgcgtgccggatatgagtgcctaccgtaagttgctgggggaaaccctgctgcgtctgcctggcgtcaatgacacacggacatacgttgttatggaagaagtcaagcagagtaatcgtctggttattaagacgcgctaacacggaacaggtgcaaaatcggcgtattttgattacactcctgttaatccatacagcaacagtactggggtaacctggtactgttgtccgttttagcatcgggcaggaaaagcctgtaacctggagagcctttcttgagccaggaatacattgaagacaaagaagtcacattgacaaagttaagtagcggccgccgccttctggaggcgttgctgatccttattgtcctgtttgccgtctggttgatggctgccttactaagctttaaccctagcgaccccagctggagccaaacggcctggcatgaacctatccataatttaggtgggatgcccggtgcgtggttggcagatacgctgttctttatttttggcgtgatggcttacaccattcccgtcattattgtcggcggttgttggtttgcctggcgtcatcagtccagcgacgaatacattgattattttgccgttagcctacgcatcattggcgttttggcgctcatccttacctcctgtggtctggcggcaatcaacgctgacgatatctggtattttgcctccggtggcgtcattggcagcttactaagcactacgctacaaccactgctacacagtagcgggggaactattgcgctgctctgcgtttgggcagcgggcctgacgttgttcaccggttggagttgggtgaccattgctgaaaaactcggcggctggattttaaacattctcaccttcgccagtaatcgtacccgtcgcgatgatacctgggtcgatgaagatgagtatgaagacgacgaagagtatgaagatgaaaatcacggcaaacagcatgaaagtcgccgtgcccgtattcttcgcggcgcgctagcgcgtcgtaaacggttggcggaaaaattcattaatccgatggggcggcaaacagacgctgcgttgttctccggtaagcggatggatgatgacgaagagattacctacactgcacgcggtgtggctgccgacccggacgacgtcctatttagcggcaatcgtgcaacgcagccagaatatgacgaatacgatccattattaaacggtgcgccaattaccgaacctgtcgctgtagcagctgctgctaccacggcgacacaaagctgggctgcgccggttgaacctgtgactcagacgccgcctgttgcctctgttgatgttccacctgcgcaacctacagtagcctggcagcctgtaccgggtccacaaacgggagagccggttattgctcctgcaccggaaggttacccacagcagagtcaatatgcgcagcctgcagtgcaatataatgagccgctgcaacaaccagtacagccgcagcagccgtattatgcacctgcagctgaacaacctgcgcaacagccgtattatgcccctgcgccagaacaaccggtggcaggtaacgcctggcaagccgaagagcagcaatccacttttgctccacagtctacataccagactgagcaaacttatcagcagccagccgctcaggagccgttgtaccaacagccgcaacccgttgaacagcagcctgttgtggagcctgaacccgttgtagaagagacaaaacccgcgcgtccgccgctttactactttgaagaagttgaagagaagcgagcccgtgaacgtgaacaacttgcggcctggtatcaaccgattccagaaccggttaaagaaccagaaccgatcaaatctagcctgaaagcaccttctgttgcagcagtacctccagtagaagccgctgccgctgtttccccgctggcatctggcgtgaaaaaagcgacactggcgacgggggctgccgcaaccgttgccgcgccagtcttcagtctggcaaatagcggtggaccgcgtcctcaggtcaaagaggggattggtccgcagttgccacgaccgaaacgtatccgcgtgccaactcgtcgtgaactggcgtcttacggtattaagctgcccagtcagcgtgcggcggaagaaaaagcccgtgaagcccagcgcaatcagtacgattctggcgatcagtacaacgatgatgaaatcgatgcgatgcagcaggatgaactggcacgtcagttcgcccagacacagcagcaacgctatggcgaacagtatcaacatgatgtgcccgtaaacgcagaagatgcagatgctgcggcagaggctgaactggctcgtcagtttgcgcaaactcaacaacaacgttattccggcgaacaaccggctggggcgaatccgttcagcctggatgattttgaatttagcccaatgaaagcgttgctggatgatggtccacacgaaccgttgtttacgccaattgttgaacctgtacagcagccgcaacaaccggttgcaccgcagcagcaatatcagcagccgcaacaaccagttccgccgcagccgcagtatcagcagccacaacagccggttgcgccgcagccacaatatcagcagccgcaacaaccggttgcgccacagcagcaatatcagcagccgcaacaaccggttgcgccgcagcagcagtatcagcagccacaacagccagttgcgccacaaccgcaggataccctgcttcatccgctgttgatgcgtaatggcgacagccgtccgttgcataaaccgacgacgccgctgccttctctggatttgctgacaccgccgccgagcgaagtggagccggtagatacctttgcgcttgaacaaatggctcgcctggtggaagcgcgtctggctgatttccgtattaaagccgatgtcgtcaattactctccggggccggttatcactcgctttgaattgaacctggcaccgggcgtaaaagcggcgcgcatttctaacttgagtcgggaccttgcccgtagtcttagcacggtggcggtgcgtgtcgttgaagttattcctggcaaaccctatgtaggtctggagttaccgaataaaaaacgacaaaccgtttatctgcgcgaagttttggataacgccaaattccgcgataatccgagcccattaaccgtggtgctgggtaaagatatcgccggtgagccggtggttgccgatctggcgaaaatgccgcacttgttggttgcggggactaccggttccggtaaatctgtcggtgtgaacgcgatgatcctgagcatgctttataaagcacagccagaagatgtgcgtttcatcatgatcgacccgaaaatgctggagcttagcgtttatgaaggcattccgcatctgttaacggaagtcgttactgatatgaaagatgccgccaacgcgctgcgctggtgtgttaacgagatggagcgtcggtataaactgatgtctgcgctgggtgtgcgtaatctggcgggttataacgaaaaaattgctgaagccgatcgcatgatgcgtccgattccagacccgtactggaagccgggtgacagtatggatgcccagcatccggtgctgaaaaaagaaccatacattgtggtgttggttgacgaatttgccgacctgatgatgacggtaggtaaaaaagtggaagagctgatagcacgtctggcgcaaaaagcccgtgccgcgggtatccacctcgtactggcaactcagcgtccaagcgttgatgttattactggtctgattaaagcgaatattccgacccgtatcgcctttaccgtatccagtaagattgacagtcgtaccattcttgatcaggctggcgcggaaagtctgctgggtatgggggatatgctctactctgggccgaactccacgttgccggtacgtgtccatggtgcttttgttcgcgatcaggaagttcatgccgtggtgcaggactggaaagcgcgtggtcgcccacagtatgttgatggcatcacctccgacagcgaaagcgaaggtggtgcgggtggtttcgatggcgctgaagaactggatccgttgttcgatcaggcggtgcagtttgtcactgaaaaacgcaaagcgagtatttctggcgtacagcgtcagttccgcattggttataaccgtgcagcgcgtattatcgaacagatggaagcgcaggggattgtcagcgaacaggggcacaacggtaatcgtgaagtgctggccccaccgccgtttgactaactaatgcatcgtatgccggataaggcgcggtagcgtcgcatccggcactctatcaactgaaaattcagtattttcttctttcctcaagctgattattagcctggaatagagagtagagggaactcccgatcgggagtgacgtaatttgaggaataatgatgaaaaaaattgccatcacctgtgcattactcagtagcttagtagcaagcagcgtttgggctgatgccgcaagcgatctgaaaagccgcctggataaagtcagcagcttccacgccagcttcacacaaaaagtgactgacggtagcggcgcggcggtgcaggaaggtcagggcgatctgtgggtgaaacgtccaaacttattcaactggcatatgacacaacctgatgaaagcattctggtttctgacggtaaaacactgtggttctataacccgttcgttgagcaagctacggcaacctggctgaaagatgccaccggtaatacgccgtttatgctgattgcccgcaaccagtccagcgactggcagcagtacaatatcaaacagaatggcgatgactttgtcctgacgccgaaagccagcaatggcaatctgaagcagttcaccattaacgtgggacgtgatggcacaatccatcagtttagcgcggtggagcaggacgatcagcgcagcagttatcaactgaaatcccagcaaaatggggctgtggatgcagcgaaatttaccttcaccccgccgcaaggcgtcacggtagatgatcaacgtaagtaaaggcacctgagtgagcaatctgagcctcgattttagcgataatacttttcaacctctggccgcgcgtatgcggccagaaaatttagcacagtatatcggccagcaacatttgctggctgcggggaagccgttgccgcgcgctatcgaagccgggcatttacattctatgatcctctgggggccgccgggtaccggcaaaacaactctcgctgaagtgattgcccgctatgcgaacgctgatgtggaacgtatttctgccgtcacctctggcgtgaaagagattcgcgaggcgatcgagcgcgcccggcaaaaccgcaatgcaggtcgccgcactattctttttgttgacgaagttcaccgtttcaacaaaagccagcaggatgcatttctgccacatattgaagacggcaccatcacttttattggcgcaaccactgaaaacccgagctttgagcttaatagcgcactgctttcccgtgcccgtgtctatctgttgaaatccctgagtacagaggatattgagcaagtactaactcaggcgatggaagacaaaacccgtggctatggtggtcaggatattgttctgccagatgaaacacgacgcgccattgctgaactggtgaatggcgacgcgcgccgggcgttaaatacgctggaaatgatggcggatatggccgaagtcgatgatagcggtaagcgggtcctgaagcctgaattactgaccgaaatcgccggtgaacgtagcgcccgctttgataacaaaggcgatcgcttttacgatctgatttccgcactgcataagagcgtacgtggtagcgcacccgatgcggcgctgtactggtatgcgcgaattattaccgctggtggcgatccgttatatgtcgcgcgtcgctgtctggcgattgcgtctgaagacgtcggtaatgccgatccacgggcgatgcaggtggcaattgcggcctgggattgctttactcgcgttggcccggcggaaggtgaacgcgccattgctcaggcgattgtttacctggcctgcgcgccaaaaagcaacgctgtctacactgcgtttaaagccgcgctggccgatgctcgcgaacgcccggattatgacgtgccggttcatttgcgtaatgcgccgacgaaattaatgaaggaaatgggctacgggcaggaatatcgttacgctcatgatgaagcaaacgcttatgctgccggtgaggtttacttcccgccggaaatagcacaaacacgctattatttcccgacaaacaggggccttgaaggcaagattggcgaaaagctcgcctggctggctgaacaggatcaaaatagccccataaaacgctaccgttaatgttatcgttgcggtaatgttgttactgtatccctgtggtcgcaggctgtggccacatctcccatttaattcgataagcacaggataagcatgctcgatcccaatctgctgcgtaatgagccagacgcagtcgctgaaaaactggcacgccggggctttaagctggatgtagataagctgggcgctcttgaagagcgtcgtaaagtattgcaggtcaaaacggaaaacctgcaagcggagcgtaactcccgaagcaaatccattggccaggcgaaagcgcgcggggaagatatcgagcctttacgtctggaagtgaacaaactgggcgaagagctggatgcagcaaaagccgagctggatgctttacaggctgaaattcgcgatatcgcgctgaccatccctaacctgcctgcagatgaagtgccggtaggtaaagacgaaaatgacaacgttgaagtcagccgctggggtaccccgcgtgagtttgactttgaagttcgtgaccacgtgacgctgggtgaaatgcactctggcctcgactttgcagctgcagttaagctgactggttcccgctttgtggtaatgaaagggcagattgctcgcatgcaccgcgcactgagccagtttatgctggatctgcataccgaacagcatggctacagtgagaactatgttccgtacctggttaaccaggacacgctgtacggtacgggtcaactgccgaaatttgctggcgatctgttccatactcgtccgctggaagaagaagcagacaccagtaactatgcgctgatcccaacggcagaagttccgctgactaacctggtgcgcggtgaaatcatcgatgaagatgatctgccaattaagatgaccgcccacaccccatgcttccgttctgaagccggtagttatggtcgtgacacccgtggtctgatccgtatgcaccagttcgacaaagttgaaatggtgcagatcgtgcgcccagaagacagtatggcggcgctggaagagatgactggtcatgcagaaaaagtcctgcagttgctgggcctgccgtaccgtaaaatcatcctttgcactggcgacatgggctttggcgcttgcaaaacttacgacctggaagtatggatcccggcacagaacacctaccgtgagatctcttcctgctccaacgtttgggatttccaggcacgtcgtatgcaggcacgttgccgcagcaagagcgacaagaaaacccgtctggttcataccctgaacggttctggtctggctgttggtcgtacgctggttgcagtaatggaaaactatcagcaggctgatggtcgtattgaagtaccagaagttctgcgtccgtatatgaacggactggaatatattggctaatacccaatttttctgaatctaaaaagcgcctgcgggcgctttttttgtctccctttgataccgaacaataattactcctcacttacacgtaatactactttcgagtgaaaatctacctatctctttgattttcaaattattcgatgtatacaagcctatatagcgaactgctatagaaataattacacaatacggtttgttactggaatcaatcgtgagcaagcttgagtgagccattatgaaaacgaaaatccctgatgcggtattggctgctgaggtgagtcgccgtggtttggtaaaaacgacagcgatcggcggcctggcaatggccagcagcgcattaacattaccttttagtcggattgcgcacgctgtcgatagcgccattccaacaaaaagtgacgaaaaggttatctggagcgcctgtacagttaactgtggtagtcgctgcccgctacgtatgcacgtcgtggacggtgaaatcaaatatgtcgaaacggacaataccggcgatgacaattacgacggcctgcaccaggttcgcgcctgcctgcgtgggcgttccatgcgtcgccgtgtctacaatccggaccgcctgaaatatccgatgaaacgagtcggggcgcgcggtgaaggcaaattcgagcgcattagctgggaagaagcctacgacatcatcgcgaccaatatgcagcgcctgatcaaagagtacggcaacgagtctatctatctgaactatggcaccggtacgctgggcggcaccatgacccgctcctggccgccgggaaataccctggtcgcgcggctgatgaactgctgcggcggctatctgaaccattacggcgactactcctccgcgcaaattgcggaaggtttgaactatacctacggcggctgggcagatggcaacagcccgagcgatatcgaaaacagtaagctggtagtgctgtttggtaataaccctggcgaaacgcgaatgagtggcggtggggtgacttactatcttgaacaggcacgccagaaatctaatgcccgcatgatcatcatcgatccgcgctataccgacaccggtgccgggcgcgaagatgagtggatccctattcgtccgggaacagatgccgcactggttaacggtctggcgtacgtcatgatcactgaaaacctggtggatcaggcattcctcgataaatattgcgttggctacgatgagaaaaccctgccagccagtgcgccgaaaaatggccactataaagcttatattctgggtgaagggccagatggcgtggctaaaacgccggaatgggccagccaaatcactggtgttccggcagacaaaatcatcaaattggctcgtgaaatcggtagtaccaaaccggcgtttatcagccagggatggggcccgcagcgtcacgctaacggtgaaatcgcaacccgtgctatcagcatgctggcgattctgaccggtaacgttggtattaacggaggcaacagcggcgcgcgtgaaggtagttacagcttaccgtttgtccgtatgccgaccttggaaaacccgatccagaccagcattagcatgtttatgtggaccgatgccattgaacgtggcccggaaatgacggcgctgcgtgatggtgtacgcgggaaagataagctggatgtgccgatcaaaatgatctggaactatgccggtaactgcctgattaaccagcattctgaaatcaaccgtacccatgaaatccttcaggatgataagaagtgcgagctgattgtggttatcgactgccacatgaccagtagcgcgaaatatgctgacatcctgctgcctgactgcaccgcttccgaacagatggactttgcgctggatgcatcctgcgggaatatgtcttacgtgattttcaacgatcaggtgattaaaccgcgctttgaatgtaagaccatctatgaaatgaccagcgaactggcaaaacgtcttggcgttgagcaacagtttactgaaggccgtacccaggaagagtggatgcggcatctgtatgcccagagccgggaagcgattcctgaactgccaacgtttgaagagttccgcaagcaggggatctttaaaaagcgcgacccacaagggcatcacgttgcttataaagccttccgtgaagatccgcaggcaaacccactgactacgccaagcggcaaaattgagatttatagccaggcgctggctgacattgccgctacctgggaattgcctgaaggcgatgtgatcgatccactgccgatctacacgccgggctttgaaagttatcaggatccgctgaacaaacagtatccgctgcagcttacaggtttccactataaatctcgcgttcacagtacttacggcaacgttgatgtgctgaaagcggcttgccgtcaggaaatgtggatcaacccgcttgatgcccaaaaacgcggtatccacaacggcgataaagtcaggatctttaacgatcgtggtgaggttcatattgaggcgaaagtgacgccacgaatgatgccgggtgtggtcgcactgggtgaaggtgcctggtatgacccggatgcaaaacgtgtcgataagggtggttgtattaacgtactgaccactcaacgtccgtctcctctcgctaaggggaatccgagtcatacaaaccttgttcaggttgaaaaggtgtaaggagtaaccgatgacaacccagtatggattttttattgattccagccgttgcaccggttgcaaaacctgcgagctggcctgtaaagactacaaagatttgacgccagaagtcagcttccgccgcatttatgaatatgctggcggcgactggcaggaagataacggtgtctggcaccagaacgtgtttgcctactatctgagcattagttgtaaccactgcgaagatccggcttgtactaaagtctgcccgagcggtgcgatgcataaacgtgaagatggttttgttgtggtcgatgaagatgtgtgcattggctgccgctactgccatatggcttgcccgtatggcgcaccgcaatataacgaaacgaaaggccatatgaccaaatgcgatggttgttatgaccgtgttgcggagggtaaaaagccgatctgtgttgaatcttgtccgctgcgggcgctggatttcggccctatcgacgagctgcgtaaaaaacatggcgatctggcggccgttgcgccgttgccgcgagctcactttaccaaaccgaatattgtgatcaaacccaatgccaatagccgcccgaccggggataccactggctatctggcaaacccgaaggaggtgtgagatgggaagtggatggcatgaatggccgctgatgatcttcacggtcttcgggcaatgtgtagcaggtggttttatcgttctggctttggcgctgctcaaaggcgacctgcgagcagaagcccagcagcgtgttatcgcctgcatgtttggtttatgggtgctgatgggcattggctttatcgcctctatgctccatcttggtagtccaatgcgcgcttttaacagcctcaaccgggtaggggctagtgcactcagtaacgaaatcgccagcggtagcatcttttttgccgtaggcggcatcggctggttgctggcaatgctgaaaaagctgagtccggcattgcgtacgctgtggctgatagtgacgatggttcttggcgtcatctttgtctggatgatggtgcgtgtgtataacagcattgataccgttccgacctggtacagcatctggacgccgatgggcttcttcctgacgatgtttatgggcggcccgttactgggttacctgttgttgagtctggctggcgtcgatggctgggcgatgcgtctgctgccagcaatttctgtactggcactggtagtgagtggcgtggtgagtgtgatgcagggcgcagagctggcgactattcatagttctgtgcagcaggccgcagcgctggtgccggactatggtgcgctgatgtcctggcggatcgtgcttttggccgttgccctgtgcttgtggattgcaccacagctaaaaggttatcagcctgcggttccgctactttctgtaagtttcattctgcttctggcaggggaattaatcggtcgcggcgtattctatggtttgcatatgaccgtggggatggccgtcgcaagctaatcataacaaccggggtttcggccccggttctcttttatttctgcttcgttaacgtgtcataactggtcatcaaattacgataatcaggaatgtggttagagaacaacgtcgccagtccttcaatatcattacgccagtcgcgatgcagctcgcacgccacgccgaaccatgtcatcaattgcgcaccagcttggctcaagcgatcccatgcgctatgccgggtaatttcattaaaggtcccactcgcgtcagtcacgacaaagacgtcaaacccttcttcaatggcactaagcgccgggaatgccacgcaaacttcggttaccacaccggcaataattaactgttttttacctgtcgctttgacagcttttacaaaatcttcgttatcccaggcgttaatatttcccgggcgagcaatgtaaggtgtatcggggaattgtgctttcagttctggaactaatgggccgttaggaccggtttcaaaactggtggtaagaatagttggtaagttgaaatacttagccaggtcacccagcgccagcacgttatttttaaacttatcgggttcgatatcccgtacaagggaaagtaaaccagcctggtgatcaacaagcaaaacggcagcatcatttttatcaagacgaacatacggtttggtcatcctcttctcctttcgagagtcagtggtacgtctgaaatcgatcagacgcgatgcattgctctgaaagcatagacgggaaatatgagtttgctgtgaccatgaaatttttcgactgaacgaagcgtatgaaatttgtgttagttcaataaaaacaatcagatgagactaatcatctcttcagcattagcgttatgaatgagtaatataaatcgataataccgccgctgggatatcgcgtattttcacccattgacaatgtttttggcggtggcatgatgcgcatgaaatttgaacttcctcacggttttaattcatgtccacgtatacccagcctgtcatgcttttgctgtctggcctgcttttgttgactctggcgattgcggtgttaaatacactcgtgccgctttggctcgcccaggaacacatgtccacatggcaggtaggcgttgtcagcagttcctattttaccggcaaccttgtcggtacattgctgacagggtatgtcattaagcgcattggctttaaccgcagctattatctggcctccttcatttttgccgctggctgtgccggccttggcctgatgattggattctggagctggttggcttggcgttttgtcgcgggcgtcggctgtgccatgatttgggtggttgttgagagcgcgctgatgtgcagtgggacgagtcgtaaccgtgggcgtttgcttgctgcgtatatgatggtttattacgtgggaacgtttttaggccagttactggtcagcaaagttagtaccgagctgatgtccgtattgccgtgggttacaggtttgacgttggcagggatcttaccgctgttgtttacgcgtgtgctgaatcagcaggctgaaaaccatgatagcacgagtattacgagtatgctaaaactccgtcaggcgcggcttggcgtgaatggctgcattatcagtggaatcgttctgggatctctatatggcctgatgccgctgtacctcaatcacaaaggggtgagcaatgccagcattggtttctggatggcggtactggtcagtgcgggtatccttggacaatggccgattggacgtctggcggataagtttggtcgactgctggtgttgcgtgttcaggtctttgtcgtcattctcggcagtatcgcgatgcttagccaggcggcgatggccccagcgttattcatcctcggtgccgctggctttacgctatatccggtggcgatggcatgggcttgcgagaaagttgaacatcatcaactggtggcgatgaaccaggccttactgttgagctatactgtgggaagtctgcttggcccgagttttaccgctatgctaatgcagaatttctccgataatttattgtttatcatgatcgccagcgtaagctttatctatttgctgatgctgctgcgcaacgccggtcatacgccgaaacccgttgctcacgtgtaaatgaattcaagcagagtgtgaacttactgtttcacactctgcttttttgtttcttctatctgacttgctttattccaaattttattcgtttaaaaataaaatgtgcagcaggttataattttgcatttcgctatttccgcacttcttatttgccgcgcataatccctcgttttaccgatgcccctttaattttggcgaaggatttgtctatggctgggaatgttcaggaaaaacagttgcgatggtacaacattgcgctgatgtcttttatcactgtctggggttttggcaacgttgttaataactatgccaaccaggggctggtggttgtttttagttgggtgtttatctttgcactctatttcacaccttatgcgctaattgttggtcagttaggcagcaccttcaaagatgggaagggcggggtcagtacctggattaaacacacgatgggacccggactggcttatctcgccgcgtggacctactgggtggtgcatattccctatctggcacaaaaaccccaggcaattctgattgcgctcggttgggcgatgaaaggcgacggtagcctaatcaaagaatatagtgtcgtagcgttacaggggttaacgctggtgctgtttatcttctttatgtgggttgctagtcgcggtatgaaaagcctgaaaatcgtcggttctgtggcagggattgctatgtttgttatgagtctcctgtatgtggcgatggcggtaaccgcgcctgcaattactgaagtgcatattgcgaccacaaacattacctgggaaacgttcattcctcatatcgactttacctacattaccactattagtatgctggttttcgcggttggcggagcagagaagatttctccttacgttaatcaaacgcgcaacccaggaaaagaatttccaaaagggatgttatgcctggcggtgatggttgcggtttgtgccattctgggcagcctggcgatggggatgatgtttgatagccgtaatatcccggatgacttaatgaccaacggtcagtattacgcctttcagaagctgggcgagtattacaacatgggtaatactttaatggtgatttacgccattgcgaataccctgggacaagtagcggcgctggtattcagcattgatgccccgcttaaagtgctattaggtgatgctgacagcaaatatattccagccagtttatgtcgtaccaacgcttctggtacgcccgttaatggctattttctgaccctggtactggtggcgattctgattatgctgccgactctcggcattggtgatatgaacaatctctataaatggctgttgaaccttaatagcgtagtgatgccgctgcgttatttatgggtatttgttgcatttattgcagtcgttcgcttggcgcagaaatataaaccagaatatgtctttattcgtaataagcctctggcaatgaccgtcgggatttggtgttttgcctttaccgcctttgcctgtttgacggggatcttcccgaaaatggaagccttcactgcagagtggaccttccagttggcgctgaatgttgcaacgccgtttgtgctggtaggattaggactgatattcccgctgctggcgcgtaaagcgaatagtaaataattattgtggtcggtgacgctgactctggcagatctgacccgtttttacataatcgagaaatgcgcgcaagccgcaggacatatactggcggtttggataatagatctggaagcctggacgctctgtgctccagtcttccagtacacattctaaacgaccagtatcaaggtactccttgatctgttcatagagcagatacccgataccagcacccatcaaaacggcctccagttcagcatcaacatcatccagaatgatatttcctgcgacagcaatttccagctcctttgcaaattgccagtggaaaggtttgccgctgggataacgaaaaacaacacattgatgattaagcagatcatgaggatggcggggtttgccatatcttgcaaagtactctggcgttgctgctacacataatttcactggcgggccgatcgccacgctgatcatatctttttcgacgatgcaactaagtcgaacgccagcgtcaaagccctgttggacgatatcgacaagagagtcgtcagttgtgagctcgactttaatatcaggatattcacgtgtgaaaccaaccagtaaagacattaaaaatatacgtgcagctacccgggcggcattgattttgagcgttcctgtcggtgtcagacgaaaatcattcatctcatctaacatgatctgaatttcgtcgaaagctgggcgcaatcgttcatagagattagaacccgcttccgttaagcttacgcttcgggttgtccgattgaataagcgaattttaagacgttgttccagtgttttaatactatggctaatggcggagctggataagcctaactcatcgcccgctgcacgaaagctttgattacgggccacggcaaagaaagtggcaaagtcagacatattcatccgcattagtgaaaatccttcattaactcatcctgaatcatcacgtttacaggattatgccgcctgcgtaaagtgcgctccagaacttaacgtggaggtaaaattatgcagtctgaacgtatttatttggtatgggcccatcctcgtcatgatagtttgaccgcacatattgctgatgcgatccatcagcgggcaatggagcggaaaatacaggtgacggaactcgatttatatcggcgtaatttcaacccagtgatgacgccggaagatgaaccagactggaagaatatggataaacgttattctccagaggttcatcagctttatagtgagctgcttgaacatgacacgttagtggtggtttttcctctctggtggtacagcttcccggcaatgctaaaaggatatattgacagagtatggaataatgggctggcttatggagatgggcacaaattaccattcaataaagttcgttgggtggcgctggttggaggagacaaagaaagttttgtccagatgggctgggaaaaaaatataagcgattatttaaaaaatatgtgcagttatcttggtattgaagatgccgatgtcactttcttgtgtaatacagtggtattcgatggggaagaacttcacgcgagctattatcagagcttattatctcaggtacgggatatggtagatgcactataagatgtgttaaaaacgctgtagcagaatgaagcgcggaataaaaaagcggcaactcaataaagttgccgctttacggggaaattagaacattaccttatgaccgtactgctcaagaatgcctttcacgcgttccatggtctctttcttcggtggtttaacaccgtcgagtttgtactcttcacccattgccacccatttgtgtttgcccagctcgtggtaggggagaagctcgattttctcaacgttgcccatatcacgggtaaattcaccgaggcgatgcgcactatcgtcatcgtcagaccagcctgggacaacaacgtagcggatccacaccttcacatttttgttcgccagatatttagcgaactccagcgtgcggtggttggaaactccaaccagattttggtggatctcgtcgttcatctgtttgagatcgagcattaccaggtcggttacttccagcagttcatcaatcaccggatcgtaacgacgaacaaaaccgttggtgtccagacaggtatgaatgccttcttttttgcaggcgcggaaccagtcacgaacaaactcagcttgcaggattgcttcaccgccggatgcggtaacgccgccgccggaagcgttcataaagtggcgataggtcaccacttccttcatcaaatcttcaacggtaacttctttaccgccatgcgtgtcccaggtgtcgcggttatgacaatacaggcagcgcatcaggcagccctggaaaaaggtgataaagcgaatacctgggccgtctacggttccacaggattcaaaggagtgaatgcgaccaataacactcattgcggtgtttctccagatgtggcccatctgaggccgtgttggtgcgcagctcgaaggctacgtcgagtctgttttggcagtcaccttaaagtatagatagctgacaaaaaaggctctcgcgctaaaaaaggccccactttcgtggagcctttattgtacgctttttactgtacgatttcagtcaaatctaattacatagattgagtgaaggtacgagtaataacgtcctgctgctgttctttagtcaggctgttgaaacgtactgcgtagccagatacacggatggtcagctgcggatatttttccgggttttccatcgcgtcgagcagcatttcacggttcatcacgttaacgttcaggtgctgaccaccttcgatggatgcttcgtggtggaagtaaccatccatcagaccagccaggttggtcttacgaacttcgtcgtctttacccagtgcgttcggaacgatagagaaggtgtaggagataccatctttagcgtaagcaaacggcagtttagcaacggaagtcagagaggctactgcacctttctggtcacgaccgtgcatcgggttagcacccggtccgaacggcgcgccagcacgacgaccgtctggggtgttacccgttttcttaccatacacaacgttagaagtgatggtcagaacagactgagtcgggatagcgtcacggtaggtgtgcagtttctgaattttcttcatgaaacgttctaccaggtcaacagccaggtcatctacacgcggatcattgttaccaaactgcgggtattcgccttcgatttcgaagtcgatagccagaccgtcttcgtcacgaatcggtttaactttcgcatatttgattgcagacagggagtcagcagcaacggacagaccagcgataccacacgccatggtgcggataacgtcacggtcgtgcagcgccatcagagaggcttcgtagctgtacttgtcgtgcatgtagtggatgatgttcagtgcagtgatgtactgtttagccagccagtccatgaagtgatccatgcgctccatcacttcatcatagttcaggacatcgcctttgatcggttcagacttcggaccaacctgcattttcagtttttcgtcaacgccgccgttgattgcgtacagcatggttttcgccaggtttgcacgcgcaccgaagaactgcatttgtttaccaacgatcatcgggcttacgcagcaagcaatagcgtagtcatcgttgttgaagtccggacgcatcaggtcatcgttctcatactgcagagaagaggtgtcgatggacactttagcggcgaatttcttgaagttcagcggcagtttttcagaccacagaatggtcatgttcggttccggagacggacccatggtgtacagggtgttcaggaaacggaagctgtttttggtaaccagggtacgaccgtcgaggcccataccaccgatagattcggttgcccagatcgggtcgccagagaacagttcatcgtattccggagtacgcaggaagcgaaccatacgcagtttcatgaccaggtggtcaaccatttcctgcgcttcttgttcggtgatcttgccagctttcaggtcacgttcgatgtacacatccaggaaggtggaggtacgaccgaaggacattgcagcaccgttctgagacttaacagcagccaggtagccgaagtaagtccactggatagcttcctgagcgttggtagccggaccagagatgtcgtagccgtatttcgcagccatttctttcatctgacccagagcgcggtgctgttcagcgatttcttcgcgcagacggatagtctgttccaggtttacgccgttttccagatcagcctgcagagaagtgaactgtgccagtttgtctttcatcaggtagtcgataccgtacagcgcaacgcgacggtagtcaccgatgatacggccacggccatatgcatctggcagaccggtcagaacaccagatttacggcaacgcaggatgtccggagtgtaaacgtcgaacacgccctggttgtgagttttacggtattcagtgaagatttttttgatcatcggatccagttcgcggttgtacgctttgcaggaaccttcgatcattttgataccaccgaacgggataagagcacgtttcagcggagcttcagtctgcagaccaacgattttctcaagctgcttgttgatgtagccagcgtcgtgagaggtgatggtggaagcaacagcggtgtcaaagtcaactggcgcgtgagtgcggttttccagtttaacgccttccattactttgtcccacagggtggtggtcgcttcagtagcgccagccaggaaggactcgtcaccctcgtacggagtgtagtttttctgaatgaagtcacggacgtttacttcattctgccagtcacctttggtaaaaccttcccaggctgtggctaacttttcattaagctcggacatgtaacacctaccttcttaagtggattttttatttactgcgtacttcgacaaccattaatggtggtcgttttcacgcaggtaaatgacccagtatgtcaacccaaccaacaaaccaccaccgataatgttgccgatcgtaaccggaatcaggttatcagtgatgaaattcatcacggtcaggtgagaaaaattttccggtgcagaaccgactgcggtccaaaattccggggatgcgaagtcgcggattacaatacccatcgggatcataaacatgtttgcgatactgtgctcaaaaccgctggcaacaaacatcgcgaccggcagcaccataatgaacgctttgtccatcaggctgcggccagaataactcatccatactgccagacataccatcaggtttgccaggataccaagacagacggcctcaataaaagtatggtgcactttgtggtcggcggtttgtaggacgtttagtccccattgaccatttgcggtcatatactcgccggaaagccacattaaaagtacaaacagcagtgcgccgaccaggttgccaaaatagacatttagccagtttttcgccaactgaccccaggtgatgcgcccactcgccttagcaacaacaatcaacacggtggaagtaaagagatcggctccgcagacaacacaaagaatcagccccagagagaagcaaatgccgccaaccagttttgccatgccgaagggcattgtgcctgtgccagtggttgctgtgatatagaagacgaatgcgatactgatgaaaacaccggcggtaatcgccagatagaaagtcttaagcggatgtttcgttgctttatagacacccgcctcttcggccactttggccattgcagcaggaagtaaaagatcaaaagggttgtcagctttcacactaactctctctttattaagtcggcgacgagatactaacaaagcattatagatgagaaattgatatagatcatatctcgcctggcttataggcccgtaactcgcatggtttttatgcaaatacggagtaaatatttgattatccaaataaaaataaattttaaaaattaacaaatgagttgaattttttccgcatcctccgctaaaacagttaattaaaagggagcatcaggcgaataaagtaacaatatcgatcgtatttattaaatacaaattaccgatatttaaccttataattacaattattttattaatgcaaatatatgtaaagcggggcattaaaaaaacgccccgtaatataactcagactaatcattaagcctacattgcgtaggctatttgattttattttgcccagaatgctgctttggcgcgctgcagcttttcgtaggccttcaacaagctctgatgtgcagcaaacgcgtgcagatcgctatctaccggttgcaggccgtaaaacgccgcttcgccgctcattgccgcactggcggcttctacggcatctgcgccgtacatgcgaacaaacgcattcagatattgcagcggctggcgatcttcttcctgtgccagtaataacaacgtttgcaggcagcgataatagttggcgcgttccggactaaatacactactgttaaactccatcgtccattcggtccagaccagagcctgttccagatcgccaccagccagcgccagcatggcttttaattcaccgatacgcagggtgtaccaaccgttatcgctcccggtcgccagacccaacagctcacgcacgcgggtaaagtcatcaaaaccttcttcatccagttgctcgatgaggttcaggtaatcttctttttcccactcgctgcctggtaggctaagaatcgtttcacgtaaatggctgcccatactgttattcgcgagccacagatcttcagccggataaatatcggacatgccaggcacgataatacggcaagcataaacgcccagatgctcgtaatcggcaatataaacttctttatcttctttgttgaagatagccatcagtgtggcgaactcttcttccgtggtgccggagaaattccagtccacaaacggataatcggcatcctgcttgaacaggtcccaggagattaaaccgctggaatcgataaagtgcgtttcgaggttggtatgttcagcgacttcttcatcatcgaaggttggcggagtaaacacatccaaatctttcaggccacgaccttgcagcagctcggtcacggtacgttccagtgctacgccaaaatcaggatgcgcaccgaaagaggcaaagcaggtaccgttagcaggattgaacagtaccacgcaaatcaccggatactggccgccaaggctaccgtcataagcgaagattgggaaaccctccgcttccagcgtttcgatggcttcaactactgctgggtaacgcgccagcacgtctgccgggatctctggcaggctgatgctttcagcaataatgcggtttttcacgtagcgttcgaaaacttcagacaatccctgaacgcgtgcttcgttgcgggtattacctgcggacataccgttggagacgtacaggttaccaatgatattcatcggaatataaacggtctgattgtcggactgacgcgtaaacggcaggccgcaaataccacgatcttcgttaccggattgtaggtcaatcagcatgctgccggtcagttcattctccggatcataaaacgcgcgcagacggtcatcgagcagcccttctggcacatcgtcattttcggtcagtgggaaccatttttcgttgggataatgcacgaacggaccgttggcgatggtttcgcccagccagaagtccgcaaaaaagtagttggtactgagacgctcgaaatattcaccgagtgcagaagccagcgccgctttcttggttgcgcctttaccgttggtaaaacacagtgcgcactctttgtcgcgaatatgtacagaccagacgttaggcacgggattcagccaggaggcctcttcaatctgaaagccgaggtcactaagtttttgctggaagcgagcgatggaatcttccagagcggcatctttgccggggataaatgtttgcgtcatgaaaatcactttagtcgtacggaaagcgcgcaataatacgggttttatctcaaaggcgctatcaccgccgccatgccgatgaactgttgactatgcttttagcggataaaccacgttaagagcataaaaatgaaggcgttcgatctccaccgtatggcatttgataaagtgccttttgatttccttggcgaagttgcactacgtagtctttatacctttgtactggtctttttgttcctcaaaatgaccggaagacgcggtgtgcggcagatgagcctgtttgaagttttaatcattctgacgctgggaagtgcggcgggagatgtggcgttttatgatgatgtgccgatggtcccggtacttatcgtctttattactctggcgttgttataccgcctggtaatgtggttgatggcgcacagtgaaaaactggaagatcttctggaaggcaagccagttgtcattattgaagatggcgagctggcctggagcaaactcaataactccaacatgacggaatttgagttctttatggagctacgattgcgtggcgtggagcagctggggcaggtacgtctggcgattctcgaaaccaacgggcaaatcagtgtctatttctttgaagatgacaaggtgaaaccgggtttacttattttacccagtgattgtacgcagcgttacaaagtggtgccggagagcgcggactatgcctgtattcgttgtagtgaaatcattcatatgaaagcgggggaaaaacaattatgtccgcgctgtgcaaatccagaatggacgaaggcaagtcgggcaaaacgggtgacctgacagtaaaaacatcggctttttgctaataatccgagagattcttttgtgtgatgcaagccacatttttgccctcaacggttttactcattgcgatgtgtgtcactgaatgataaaaccgatagccacaggaataatgtattacctgtggtcgcaatcgattgaccgcgggttaatagcaacgcaacgtggtgaggggaaatggctcaaatcttcaattttagttctggtccggcaatgctaccggcagaggtgcttaaacaggctcaacaggaactgcgcgactggaacggtcttggtacgagcgtgatggaagtgagtcaccgtggcaaagagttcattcaggttgcagaggaagccgagaaggattttcgcgatcttcttaatgtcccctccaactacaaggtattattctgccatggcggtggtcgcggtcagtttgctgcggtaccgctgaatattctcggtgataaaaccaccgcagattatgttgatgccggttactgggcggcaagtgccattaaagaagcgaaaaaatactgcacgcctaatgtctttgacgccaaagtgactgttgatggtctgcgcgcggttaagccaatgcgtgaatggcaactctctgataatgctgcttatatgcattattgcccgaatgaaaccatcgatggtatcgccatcgacgaaacgccagacttcggcgcagatgtggtggtcgccgctgacttctctagtaccattctttcccgtccgattgacgtcagccgttatggtgtaatttacgctggcgcgcagaaaaatatcggcccggctggcctgacaatcgtcatcgttcgtgaagatttgctgggcaaagcgaatatcgcgtgtccgagcattctggattattccatcctcaacgataacggctccatgtttaacacgccgccgacatttgcctggtatctatctggtctggtctttaaatggctgaaagcgaacggcggtgtagctgaaatggataaaatcaatcagcaaaaagcagaactgctatatggggtgattgataacagcgatttctaccgcaatgacgtggcgaaagctaaccgtagccggatgaacgtgccgttccagttggcggacagtgcgcttgacaaattgttccttgaagagtcttttgctgctggccttcatgcactgaaaggtcaccgtgtggtcggcggaatgcgcgcttctatttataacgccatgccgctggaaggcgttaaagcgctgacagacttcatggttgagttcgaacgccgtcacggttaatgccgaaattttgcttaatccccacagccagcctgtggggtttttatttctgttgtagagagttgagttcatggaatccctgacgttacaacccatcgctcgtgtcgatggcactattaatctgcccggttccaagagcgtttctaaccgcgctttattgctggcggcattagcacacggcaaaacagtattaaccaatctgctggatagcgatgacgtgcgccatatgctgaatgcattaacagcgttaggggtaagctatacgcttagtgccgatcgtacgcgttgcgaaattatcggtaacggcggtccattacacgcagaaggtgccctggagttgttcctcggtaacgccggaacggcaatgcgtccgctggcggcagctctttgtctgggtagcaatgatattgtgctgaccggtgagccgcgtatgaaagaacgcccgattggtcatctggtggatgcgctgcgcctgggcggggcgaagatcacttacctggaacaagaaaattatccgccgttgcgtttacagggcggctttactggcggcaacgttgacgttgatggctccgtttccagccaattcctcaccgcactgttaatgactgcgcctcttgcgccggaagatacggtgattcgtattaaaggcgatctggtttctaaaccttatatcgacatcacactcaatctgatgaagacgtttggtgttgaaattgaaaatcagcactatcaacaatttgtcgtaaaaggcgggcagtcttatcagtctccgggtacttatttggtcgaaggcgatgcatctagcgcttcttactttctggcagcagcagcaatcaaaggcggcactgtaaaagtgaccggtattggacgtaacagtatgcagggtgatattcgctttgctgatgtgctggaaaaaatgggcgcgaccatttgctggggcgatgattatatttcctgcacgcgtggtgaactgaacgctattgatatggatatgaaccatattcctgatgcggcgatgaccattgccacggcggcgttatttgcaaaaggcaccaccacgctgcgcaatatctataactggcgtgttaaagagaccgatcgcctgtttgcgatggcaacagaactgcgtaaagtcggcgcggaagtggaagaggggcacgattacattcgtatcactcctccggaaaaactgaactttgccgagatcgcgacatacaatgatcaccggatggcgatgtgtttcagcctggtggcgttgagtgatacaccagtgacgattcttgatcccaaatgcacggccaaaacatttccggattatttcgagcagctggcgcggattagccaggcagcctgaatgaacaacgggcaataaatagccaaatctttctttatcaaaacgtcggcacattgtcggcgttttttttcggaccttgtgagtcattttgattaatggtagcgtcgcttgtcaatgtaagttgttgatacataatatttatatatgattaatcaacggatgattcacatgaagaatactaaattactgctggcgattgcgacctctgcagcattactgacagggtgtcaaaatacccacggtattgataccaatatggctatcagctccggtttaaatgcctataaagcagcaacattaagcgatgccgatgcaaaagcgattgccaatcagggctgtgccgaaatggacagcggcaatcaagtcgcaagtaaatccagcaagtacggtaaacgtctggcaaaaatcgccaaagcattgggtaacaatattaatggcacgccggtcaactataaggtttatatgaccagcgacgtcaacgcatgggcgatggcgaacggctgtgttcgtgtctacagtggcctgatggacatgatgaatgacaacgaaattgaaggcgttctgggccatgaactgggccacgtcgcgttgggtcacagcctggctgaaatgaaagcttcttatgcgatcgttgccgcacgcgatgccattagtgctaccagcggtgtggcttcccagctttcccgcagtcaattaggtgatatcgcagaaggcgctatcaatgctaaatactcccgtgataaagagtccgaagcagatgatttctcctttgatctgttgaagaaacgtggcatcagcacccaggggctggttggcagctttgaaacactggctagcctggatggcggtcgcacccagtccatgtttgactctcacccaccaagtacagagcgtgcgcaacacatccgtgatcgtatcgcctctggtaagtaaatcattgtcatctttcgggctggtcttctgccagcccgctataattgcgcaataaatccccatctgaatacagacaaaactggtttttgcacacaacgttaacgatttgtggcgtcggcgcgtataatgcgcgcggttatgttaacggtacgcctgttttaaggagataaagatgacggcaattgccccggttattaccattgatggcccaagcggtgcagggaaaggcaccttgtgtaaggctatggcggaagcgttgcaatggcatctgctggacagcggtgcaatttatcgcgtactggcattggcggcattacatcaccatgttgatgttgcgagcgaagatgcgctggtaccgctggcatcccatctggatgtacgttttgtgagcaccaatggcaatctggaagtgatcctcgaaggggaagatgtcagcggcgaaattcgtactcaggaagtggcgaatgcagctagtcaagtcgcggcattcccacgcgttcgtgaagcattattgcgtcgccaacgcgcgtttcgcgaattaccaggtctgattgccgatggccgcgacatgggaacggtggtattccctgatgcaccagtgaaaattttccttgacgcctccagcgaagaacgtgcgcatcgccgcatgctacagttgcaggagaagggctttagtgttaactttgagcgccttttggccgagatcaaagaacgcgacgaccgcgatcgtaaccgagcggtagcgccactggttccggcagccgatgctttagtgttggattccaccaccttaagcattgagcaagtgattgaaaaagcgctacaatacgcgcgccagaaattggctctcgcataagcgaccgaatttgcagtacccccgttgcaatggaatgacagcgggtatgttaaacaaccccatccggcatggagccaggtggacgttaaatataaacctgaagattaaacatgactgaatcttttgctcaactctttgaagagtccttaaaagaaatcgaaacccgcccgggttctatcgttcgtggcgttgttgttgctatcgacaaagacgtagtactggttgacgctggtctgaaatctgagtccgccatcccggctgagcagttcaaaaacgcccagggcgagctggaaatccaggtaggtgacgaagttgacgttgctctggacgcagtagaagacggcttcggtgaaactctgctgtcccgtgagaaagctaaacgtcacgaagcctggatcacgctggaaaaagcttacgaagatgctgaaactgttaccggtgttatcaacggcaaagttaagggcggcttcactgttgagctgaacggtattcgtgcgttcctgccaggttctctggtagacgttcgtccggtgcgtgacactctgcacctggaaggcaaagagcttgaatttaaagtaatcaagctggatcagaagcgcaacaacgttgttgtttctcgtcgtgccgttatcgaatccgaaaacagcgcagagcgcgatcagctgctggaaaacctgcaggaaggcatggaagttaaaggtatcgttaagaacctcactgactacggtgcattcgttgatctgggcggcgttgacggcctgctgcacatcactgacatggcctggaaacgcgttaagcatccgagcgaaatcgtcaacgtgggcgacgaaatcactgttaaagtgctgaagttcgaccgcgaacgtacccgtgtatccctgggcctgaaacagctgggcgaagatccgtgggtagctatcgctaaacgttatccggaaggtaccaaactgactggtcgcgtgaccaacctgaccgactacggctgcttcgttgaaatcgaagaaggcgttgaaggcctggtacacgtttccgaaatggactggaccaacaaaaacatccacccgtccaaagttgttaacgttggcgatgtagtggaagttatggttctggatatcgacgaagaacgtcgtcgtatctccctgggtctgaaacagtgcaaagctaacccgtggcagcagttcgcggaaacccacaacaagggcgaccgtgttgaaggtaaaatcaagtctatcactgacttcggtatcttcatcggcttggacggcggcatcgacggcctggttcacctgtctgacatctcctggaacgttgcaggcgaagaagcagttcgtgaatacaaaaaaggcgacgaaatcgctgcagttgttctgcaggttgacgcagaacgtgaacgtatctccctgggcgttaaacagctcgcagaagatccgttcaacaactgggttgctctgaacaagaaaggcgctatcgtaaccggtaaagtaactgcagttgacgctaaaggcgcaaccgtagaactggctgacggcgttgaaggttacctgcgtgcttctgaagcatcccgtgaccgcgttgaagacgctaccctggttctgagcgttggcgacgaagttgaagctaaattcaccggcgttgatcgtaaaaaccgcgcaatcagcctgtctgttcgtgcgaaagacgaagctgacgagaaagatgcaatcgcaactgttaacaaacaggaagatgcaaacttctccaacaacgcaatggctgaagctttcaaagcagctaaaggcgagtaattctctgactcttcgggatttttattccgaagtttgttgagtttacttgacagattgcaggtttcgtcctgtaatcaagcactaagggcggctacggccgcccttaatcaatgcagcaacagcagccgcttaatttgcctttaaggaaccggaggaatcatgaccaagagtgaattgatagaaagacttgccacccagcaaagccacattcccgccaagacggttgaagatgcagtaaaagagatgctggagcatatggccagcactcttgcgcagggcgagcgtattgaaatccgcggtttcggcagtttctctttgcactaccgcgcaccacgtaccggacgtaatccgaagactggcgataaagtagaactggaaggaaaatacgttcctcactttaaacctggtaaagaactgcgcgatcgcgccaatatttacggttaagttttttactcaaacttgaacgagagaaaagcacctgtcgggtgcttttttcatttctctaatctggaactggaagctgcctcgcagagttttgaacagttttcaccctttcgttaaattcttctgaatatgcctcggggaacgcaaaattcccaccagacaaccgctcaacaaagttgcacactttccataaacagggaggggtgcatgaaaataacgacagtcggtgtatgcataattagcggaatttttccgttgctgattttgccccaattgcctgggacattaacccttgcgtttctgactctcttcgcctgcgtactggcatttatccctgttaaaaccgtccgttatatcgcgctgacgttgctgtttttcgtttggggcatattaagtgcaaagcaaattttgtgggcaggagaaaccttaactggcgcgacgcaggatgcaattgttgagatcactgcaactgacggcatgaccactcattacggtcaaattactcatctacaaggtcgacgtatattccctgcgagtggtctcgtgatgtatggcgaatatcttccgcaagcggtttgtgctggacaacaatggagtatgaaactcaaagttcgtgcagttcatggccaacttaatgatggcggctttgatagccagcgttatgccattgcccagcatcagccgctcaccggccgttttctgcaggcaagtgtcattgaaccgaattgtagcctgcgtgcacagtatctggcgagtctacaaacaacgctgcaaccctatccgtggaatgcggttattcttggtttaggtatgggggaacggttatccgtccccaaagaaatcaaaaatatcatgcgcgatactggaacggcgcatttaatggcgataagcggattgcacatcgcttttgcggcgttgctggctgccggactcattcgcagtggacaaatttttctgcctgggcgctggatccactggcaaataccattaattggcggaatctgctgtgctgctttttatgcctggttgacgggaatgcaacctcctgcattgcgtaccatggtggcgcttgctacgtggggaatgcttaagttaagtgggcgacagtggagtggctgggatgtatggatatgttgtctggcggcaattttgctgatggatcctgttgccattctcagccaaagtttatggctctctgccgctgcggtcgcggcattgatattttggtatcagtggtttccctgtcctgagtggcaactgccgccggtattgcgtgcagttgtttccctcatccatctgcaactgggaatcacacttctgcttatgcccgtgcaaatcgtcatatttcatggcattagtctgaccagctttattgcaaatctattagcaattcccttggtgacatttatcacggttccgttgatcctcgccgcgatggttgtgcatttaagcgggccgttaatcctggagcaagggttatggtttcttgccgaccggtctttggctttacttttctgggggttaaagagtttgccggaagggtggatcaacattgctgaatgttggcaatggctaagtttttccccatggttcttactggtggtatggcgattaaacgcctggcgaacgttgccagcaatgtgtgtggctggaggcttgctgatgtgctggccgctgtggcaaaaacctcgacctgacgagtggcagctgtacatgcttgatgtcgggcaagggctggcaatggtgatagccagaaacggcaaagcgattctctatgacacaggactggcctggcctgaaggggatagtgggcaacaactgattatcccctggctccactggcataatcttgaaccggaaggcgttattctgagccatgaacatctggatcaccggggagggctggatagtatattgcatatatggccgatgttatggatcagaagtccgttaaactgggaacatcatcagccctgtgtgcgtggcgaagcgtggcaatggcaaggattgcgtttcagcgcgcactggcctttacaaggtagcaacgataaaggaaataaccattcctgtgtggttaaggttgatgacgggacgaatagcattcttctaaccggtgatattgaagccccagctgaacaaaagatgctaagccgttactggcagcaagtgcaggcaacattgcttcaggtacctcaccatggcagtaataccagtagtagcttgccattaattcagcgagtgaatggaaaagtggcactcgcaagcgcaagccgctataacgcatggcgactgccctctaacaaagttaagcatcgctatcaactgcaaggatatcaatggattgatactccacatcaaggtcaaacaacggtcaattttagtgcgcaaggctggcggattagcagcctcagggagcaaattttacctcgttggtatcatcagtggtttggcgtgccagtggataacgggtaaaatatgcggctatttcaacaaatgctggttttttgaatgcataacgacaaagatctctctacgtggcagacattccgccgactgtggccaaccattgcgcctttcaaagcgggtctgatcgtggcgggcgtagcgttaatcctcaacgcagccagcgataccttcatgttaagcctccttaagccacttcttgatgatggctttggtaaaacagatcgctccgtgctggtgtggatgccgctggtggtgatcgggctgatgattttacgtggtatcaccagctatgtctccagctactgtatctcctgggtaagtggaaaggtggtaatgaccatgcgtcgccgcctgtttggtcacatgatgggaatgccagttagtttctttgacaaacagagtacgggtacgctgttgagtcgtattacctacgattccgaacaggttgcttcttcttcttccggcgcactgattactgttgtgcgtgaaggtgcgagcatcatcggcctgttcatcatgatgttctattacagttggcaactgagcatcattttgattgtgctggcaccgattgttagcattgcgattcgcgttgtaagcaagcgttttcgcaacatcagtaaaaacatgcagaacaccatggggcaggtgaccaccagcgcagaacaaatgctgaagggccacaaagaagtattgattttcggtggtcaggaagtggaaacgaaacgctttgataaagtcagcaaccgaatgcgtcttcaggggatgaaaatggttagtgcctcttccatctctgatccgatcattcagctgatcgcctctttggcgctggcgtttgttctgtatgcggcgagcttcccaagtgtcatggatagcctgactgccggtacgattaccgttgttttctctagtatgattgcactgatgcgtccgctgaaaagcctgaccaacgttaacgcccagttccagcgcggtatggcggcttgtcagacgctgtttaccattctggacagtgagcaggagaaagatgaaggtaagcgcgtgatcgagcgtgcgactggcgacgtggaattccgcaatgtcacctttacttatccgggacgtgacgtacctgcattgcgtaacatcaacctgaaaattccggcagggaagacggttgctctggttggacgctctggtagcggtaaaagtaccatcgccagcctgatcacgcgtttttacgatattgatgaaggcgaaatcctgatggatggtcacgatctgcgcgagtataccctggcgagcttacgtaaccaggttgctctggtgagccagaatgtccatctgtttaacgatacggttgctaacaacattgcttacgcacggactgaacagtacagccgtgagcaaattgaagaagcggcgcgtatggcctacgccatggacttcatcaataagatggataacggtctcgatacagtgattggtgaaaacggcgtgctgctctctggcggtcagcgtcagcgtattgctatcgctcgagccttgttgcgtgatagcccgattctgattctggacgaagctaccagcgctctggataccgaatccgaacgtgcgattcaggcggcactggatgagttgcagaaaaaccgtacctctctggtgattgcccaccgcttgtctaccattgaaaaggcagacgaaatcgtggtcgtcgaggatggtgtcattgtggaacgcggtacgcataacgatttgcttgagcaccgcggcgtttacgcgcaacttcacaaaatgcagtttggccaatgatcgaaaaaatctggtctggtgaatcccctttgtggcggctattgctgccactctcctggttgtatggcctggtgagtggcgcgatccgtctttgctataaactaaaactgaagcgcgcctggcgtgcccccgtaccggttgtcgtggttggtaatctcaccgcaggcggcaacggaaaaaccccggtcgttgtctggctggtggaacagttgcaacagcgcggtattcgcgtgggggtcgtaagccggggatatggtggtaaggctgaatcttatccgctgttattgagcgcagataccacaacagcacaggcgggtgatgaacctgtgttgatttatcaacgcactgatgcgcctgttgcggtttctcccgttcgttctgatgcggtaaaagccattctggcgcaacaccctgatgtgcagatcatcgtaaccgacgacggtttacagcattaccgtctggcgcgtgatgtggaaattgtcgttattgatggtgtgcgtcgctttggcaatggctggtggttgccggcggggccaatgcgtgagcgagcggggcgcttaaagagcgttgatgcggtaatcgtcaacggcggtgtccctcgcagcggtgaaatccccatgcatctgctgccgggtcaggcggtgaatttacgtaccggtacgcgttgtgacgttgctcagcttgaacatgtagtggcgatggcggggattgggcatccgccgcgcttttttgccacgctgaagatgtgtggcgtacaaccggaaaaatgtgtaccgctggccgatcatcagtctttgaaccatgcggatgtcagtgcgttggtaagcgccgggcaaacgctggtaatgactgaaaaagatgcggtgaaatgccgggcctttgcagaagaaaattggtggtatttgcctgtagacgcacagcttagtggtgatgaaccagcgaaactgcttacgcaactaaccttgctggcttctggcaactaattacgccgcggcagcgttcgattgatggagtcatgaatgagcctgccgcacctctcccttgctgatgcgcgtaatcttcaccttgccgcacaaggcctgttaaacaaaccccgccgtcgagcgagcttggaggatattccggcaacgatctcccgcatgtccttgctgcaaatcgataccatcaatattgttgcccgtagtccatatctggtgcttttcagtcgtctgggaaattatcctgcccagtggctggatgagtctctggcgcgtggcgaattaatggaatactgggcgcatgaagcctgctttatgccgcgtagcgactttcgtcttattcgccaccgcatgctggcacctgaaaaaatgggctggaaatacaaagacgcctggatgcaggaacatgaggcggaaattgcacagttaattcagcatattcatgataaggggccggtacgtagtgccgattttgagcatcctcgtaaaggtgcaagcggctggtgggaatggaagccgcataaacggcatctggaaggtttatttactgccggaaaggtgatggtgattgaacggcgcaacttccagcgcgtttatgatttaacccaccgtgtcatgcctgactgggatgatgagcgcgatctcgttagccaaacagaagcagaaatcatcatgctggataacagtgcgcgtagcctgggaatattccgcgaacagtggctggcagattactatcggctgaaacgtccggcactggcggcgtggcgcgaagcgagggctgaacagcagcaaatcattgctgtgcatgttgaaaaattgggcaatctttggctgcatgatgatttgctgccgctactcgagcgagcgctggccggaaagctcactgcaacgcacagcgcggtacttagcccttttgatcctgttgtctgggatcgcaaacgcgcagagcagctttttgattttagctaccggctggagtgctataccccagcgccgaaacgccagtatggctattttgttctgccgttattacatcgtgggcaattagttgggcgaatggatgccaaaatgcatcgccagacaggcatccttgaagttatctctctgtggttacaggaaggtattaaaccaacgacaacgctgcaaaaagggctacgtcaggcgattactgatttcgctaactggcagcaggcaacgcgggtgacattaggatgctgcccgcaaggcctctttactgattgccgcaccggctgggaaatagaccccgtcgcataaatgattatgataagatttatgcattcataacccgatccatctggaggaactatggatcatcgtctgcttgaaatcattgcctgcccggtttgcaacggaaaactttggtataaccaggaaaaacaagagcttatttgcaaactggacaacctcgctttcccgctgcgtgatggcattccagtgttgctggaaacggaagcccgcgtgctgactgctgatgagagtaaaagttgatgtaaactgctgatgagagtaaatcatgagttttgtggtcattattcccgcgcgctacgcgtccacgcgtctgcccggtaaaccattggttgatattaacggcaaacccatgattgttcatgttcttgaacgcgcgcgtgaaagtggtgccgagcgcatcatcgtggcaaccgatcatgaggatgttgcccgcgccgttgaagccgctggcggtgaagtatgtatgacgcgcgccgatcatcagagtggaacagaacgtctggcggaagttgtcgaaaaatgcgcattcagcgacgacacggtgatcgttaatgtgcagggtgatgaaccgatgatccctgcgacaatcattcgtcaggttgctgataacctcgctcagcgtcaggtgggtatggcgactctggcggtgccaatccacaatgcggaagaagcgtttaacccgaatgcggtgaaagtggttctcgacgctgaagggtatgcactgtacttctctcgcgccaccattccttgggatcgtgatcgttttgcagaaggccttgaaaccgttggcgataacttcctgcgtcatcttggtatttatggctaccgtgcaggctttatccgtcgttacgtcaactggcagccaagtccgttagaacacatcgaaatgttagagcagcttcgtgttctgtggtacggcgaaaaaatccatgttgctgttgctcaggaagttcctggcacaggtgtggatacccctgaagatcttgagcgcgttcgcgctgaaatgcgctaatttcacttcacgacacttcagccaattttgggaggagtgtcgtaccgttacgattttcctcaatttttcttttcaacaattgatctcattcaggtgacatcttttatattggcgctcattatgaaagcagtagcttttatgagggtaatctgaatggaacagctgcgtgccgaattaagccatttactgggcgaaaaactcagtcgtattgagtgcgtcaatgaaaaagcggatacggcgttgtgggctttgtatgacagccagggaaacccaatgccgttaatggcaagaagctttagtacgcccggaaaagcccgacaactggcatggaaaaccaccatgctggcaagaagtgggactgtccgtatgccgactatttatggtgtgatgacgcatgaagaacaccccggccccgatgtcctgctactggagcggatgcgtggtgttagcgtggaggcaccagcccgaacaccagaacgctgggaacaactcaaagaccaaatcgttgaagccttactggcctggcaccgtcaggacagtcgcggttgcgtcggcgcggtcgacaatactcaggaaaatttctggcccagttggtaccggcaacatgttgaagtgctatggaccacgctcaatcagttcaataacaccggtctgacgatgcaggataagcggatcctgtttcgcactcgcgaatgtctcccggcattatttgaaggctttaacgacaattgtgtgctgattcacggtaacttctgtttacgcagcatgttgaaagatagccgcagcgatcagttactggcgatggtcgggccgggactaatgctttgggcaccgcgagaatacgaactgttccgactaatggataattctctggcggaagatttgctctggagttacctgcaacgcgcgccagtggcggagagcttcatctggcggcgttggttgtatgtgttatgggatgaagttgcgcaactggttaataccggacgatttagtcggcgcaacttcgatctggcaagtaaaagtctcttgccgtggctcgcctgatcactcttgccgtggctcgccactgctaccttttagccactgccagatacggccaagcgtttcatagccaacacgatcgctatgcatcaaccagaccggagaagggattgcccgttcccacgggttaagcgggctgtcgatggccaactgattcgccggggctggtagcggatttaacccttcctgctgaaaaaagatcatcgcccgcggcagatgacttgcggaggtcaccagcaggaaaggggcgtcaccaatcgcctgtttcactgctgcagcttcttcttcggtatcttttggcaaatccagggtgataatttgctcgcgcggcacgcccaggctttgcgcaactctggcacctacttccgctgtactcaccgtattggtttttgctacgcctcccgtgaagatcagtttacttcccggattttcgcgccataagcgaataccttcattcaggcgtggcagactgttattgattaaattagagctcggtgcccactgcgggttccaggtataaccacctccgagcaccacgatatagtccactttttggctattattccatgtcggataggtgctttcgatgggacgcagcaggcggtcggctaccggttgcaaactcaataacaagagcgccagccacccaatgctaataaaaatcttcccggttttttgaaaacggctaaaccacagcagcgccaggccagcgccaataatcaacaacatcagcggaagtggcagcaacatattgccaatcacttttttcagtgtaaaaagcatcctttctggttccttttttaaccatatagcaagggatcgccagcgatattacaccagacgggttcattctcgccgtggctgtgacaaaatagcgtctttatcagaaaacgtcttagccaaccggtggagaaagcaatgcaggatcgcaattttgatgatattgcggaaaagttttcccgtaacatttacggcaccaccaaagggcagcttcgacaggctattctgtggcaggatctcgatcgcgtgctggcggaaatgggcccgcaaaaactgcgtgtgctggatgctggcggtggagaagggcagaccgcaatcaaaatggccgagcgtgggcatcaggtcattttatgcgatctttctgcgcagatgatcgaccgcgcaaaacaggcggcagaagcaaaaggtgtgagcgacaacatgcaatttatacattgcgccgctcaggatgttgctagccatttggaaacgcccgttgatctgatattgttccatgcggtgctcgagtgggtggctgatccccgcagcgtattgcagaccctctggagtgtgttgcgtccaggcggcgtgttgagcttaatgttctacaatgcgcatggtttgttgatgcataacatggtcgccgggaattttgattacgtgcaggcgggaatgccgaaaaagaaaaaacggacgcttagcccagattatccacgcgacccggcgcaggtttatctgtggctggaagaagctggttggcaaattatgggtaagacaggcgttcgcgtgtttcatgattatctgcgcgagaaacaccagcagcgcgactgctatgaagcattacttgaattagaaacgcgttattgccgtcaggaaccgtatattaccctggggcgttatattcatgtcaccgcgcgcaaaccgcagagcaaggataaagtatgagtgaattttcccagacagtccccgaactggttgcctgggccagaaaaaatgacttctccatcagcctgccggtagaccgactctcttttctgctggcggttgccacgctgaacggcgagcgtctggatggtgagatgagtgaaggcgagctggtggatgcattccgccatgtgagtgatgcgtttgagcaaaccagcgaaaccatcggcgtgcgcgccaataacgcgatcaacgacatggtgcgtcaacgtctgctgaaccgctttaccagcgagcaggcggaagggaacgcaatttaccgtctgacgccgctcggcatcggcattactgactactacatccgtcagcgcgagttttctacgctgcgtctttctatgcagttgagcattgtggcgggtgagctcaaacgcgcagcagatgccgccgaagagggcggtgatgaatttcactggcaccgtaatgtctatgcgccactgaaatatagcgtagcagaaattttcgacagtatcgacctgacgcaacgtctgatggacgaacagcagcagcaggtgaaggacgatatcgcccagttgctgaacaaagactggcgggcggcgatttccagctgtgaattgttgcttagcgaaacttccggaacgctgcgtgaattgcaggatacgctggaagcggcaggcgacaaattgcaggctaatctgttgcgcattcaggatgcgacgatgacccatgacgatctgcatttcgtcgatcgtctggtgttcgatctgcagagcaaactcgatcgtattatcagttggggccagcaatccatcgacttgtggattggctacgaccgccacgtacacaaatttattcgtaccgcgatcgatatggataaaaaccgcgtctttgctcagcggttacgtcagagcgtacaaacctattttgatgagccgtgggcgctaacttatgccaatgccgatcgtctgctggatatgcgtgacgaagagatggcactgcgcgatgaagaagtgactggggaacttcctgaggatctggaatacgaagagtttaacgagatccgcgaacagctggcggcgatcatcgaagaacaacttgccgtgtacaaaaccagacaagtgccgctggatcttggtctggtggtacgcgaatatctgagtcagtatccgcgtgcacgtcactttgacgttgcgcgtattgttattgatcaggcggtacgtcttggcgtagcgcaagcagatttcaccggactgccagcgaaatggcagccgattaatgattacggagccaaggtacaggcgcatgtcatcgacaaatattgaacaagtgatgccggttaagctggcgcaggcgctggcgaatccgttatttccggcgctggacagcgccttacgtagtggacgccatattggcctcgacgaactggataatcatgcattcctgatggattttcaggaatatctggaagagttttacgcgcgttataacgttgagcttattcgcgcaccagaagggttcttctatttacgcccacgttccaccacgctgatccctcgttccgtcttgagcgaactggatatgatggtcgggaaaatcctctgttatctctatctcagcccggaacggctggcgaatgaggggattttcacccagcaggaactgtacgacgaactgctcaccctggccgatgaagcaaaactgctgaaactggtgaacaaccgtagtaccggtagtgacgttgaccgtcagaagttgcaggagaaagtacgttctagcctcaaccgtctgcgtcgtttaggcatggtgtggtttatgggccacgacagcagcaagtttcgcattaccgaaagcgtgttccgcttcggagccgatgtgcgtgctggcgacgatccccgtgaagcacagcgtcgcctgattcgtgatggcgaagcaatgccgattgaaaatcatctgcaactcaacgatgaaaccgaagagaatcagccagatagcggagaggaagaataatgattgaacgcggtaaatttcgcagtctgacgctgattaactggaacggcttttttgcccgaacttttgaccttgacgagctggtcacgacgctttctggcggtaacggggcgggtaaatccaccaccatggcggcgttcgttacggcgctgatccccgacctgaccctgctgcatttccgtaacactacggaagccggggccaccagcggtagccgcgataaaggtctgcacggtaagctgaaagcgggtgtctgttatagcatgctcgacaccattaacagccgccaccagcgcgtggtggtcggtgtgcgtctgcaacaggttgccggacgcgatcgtaaagtggatatcaagccgtttgccattcagggactgccgatgagcgtgcagccgacacagctggtgaccgaaaccctgaacgaacgccaggcgcgcgtgctgccgcttaacgagctgaaagacaagctcgaggcgatggaaggcgtgcagtttaaacagttcaactccattactgattaccacagcctgatgttcgatctgggcatcatcgcgcgtcgtctgcgctccgcatctgaccgtagcaaattctatcgtctgatcgaagctagcctgtatggcgggatctccagtgccattacccgttctctgcgcgactacctgttgccagaaaacagcggcgtgcgtaaagcgttccaggacatggaagcggcgctgcgtgaaaaccgtatgacgctggaagcgattcgtgtcacccagagcgaccgcgacctgtttaagcatctgatcagcgaagccaccaactacgtggcggcggactacatgcgtcacgccaacgagcgccgtgtccatctcgacaaagccctggagtttcgtcgcgagctacatactagccgtcagcaactggcggctgagcagtacaaacacgtcgatatggcgcgtgagctggcagagcacaacggtgccgaaggcgatctggaagcggattatcaggcggccagtgatcacctgaacctggtgcaaaccgcactgcgtcagcaggagaagatcgaacgctacgaagcggatctcgatgagctgcagatccgtctggaagagcaaaatgaagtggtggcagaagccatcgaacgccagcaagagaatgaggctcgtgcggaagctgccgaactggaagtggacgagctgaaaagccagcttgctgactaccagcaggcgctggacgtccagcaaacgcgcgcgatccagtataaccaggcgattgctgcgcttaatcgtgccaaagaactgtgccatctgccggacttaaccgccgactgcgccgccgaatggctggaaaccttccaggcgaaagagctggaagcgactgaaaaaatgctctctcttgagcagaaaatgagcatggcgcaaaccgcgcacagccagtttgagcaggcttatcagctggtggtggcaatcaacggcccactggcgcgtaacgaggcgtgggatgtcgctcgcgaactattgcgcgaaggggtcgatcagcgtcacctggcagagcaggttcagccgctgcggatgcgattaagcgaactggaacagcgtctacgcgagcagcaagaagctgagcgtctgctggcagatttctgcaaacgtcagggcaagaattttgatatcgacgaactggaagccctgcatcaggaactggaagcacgcattgcctctctttccgatagcgtgtctaacgcccgtgaagagcgcatggcactgcgccaggagcaggaacagctgcagtctcgcattcagagtttgatgcagcgtgcgccggtttggctggcagcgcaaaacagtctcaaccagttgagcgaacagtgcggcgaagagtttacctccagccaggacgtcaccgaatatctgcaacagttgctggagcgtgagcgagaggcgattgttgaacgcgatgaagtgggcgcgcgcaaaaacgccgtcgatgaagagatcgaacgtttaagccagcctggcggctctgaagatcagcgtctgaacgcgctggcggagcgttttggtggtgtgctgctgagtgaaatttatgacgacgttagcctggaagatgcgccgtacttcagtgcgctgtatggcccgagtcgccacgccatcgtggtgccagatctgagtcaggtaactgaacacctggaaggcttgaccgattgcccggaagatctctatctgatcgaaggagatccgcagagtttcgatgacagcgtgttcagcgttgatgagctggaaaaagcggtagtggtgaaaatcgccgatcgtcagtggcgttatagtcgtttcccggaagtgccgctgtttggtcgtgctgcgcgtgaaagccgtattgaaagcctccatgccgagcgtgaagtgctttccgaacgcttcgccacgctctcctttgatgtacagaaaactcagcgtctgcatcaggcgttcagccgctttatcggcagtcatctggcggttgcgtttgagtctgacccggaagcagaaatccgtcaactgaacagccgtcgcgtcgaactggagcgggcgttaagtaatcatgaaaatgataaccagcagcagcgtattcagtttgagcaggcgaaagagggcgttacggcgctgaaccgcattctgccgcgtctcaacctgttggctgatgacagcctggcggatcgcgtcgatgaaatccgcgaacgtctggatgaagcccaggaagccgcgcgttttgttcagcagtttggcaatcaactggcgaaactggaaccgattgttagcgtattgcagagcgacccggaacagttcgaacagttaaaagaagattacgcgtactctcagcagatgcagcgcgatgcccgtcagcaggcgtttgccctgacggaagtggtgcagcgtcgtgcgcactttagctattctgacagcgcagaaatgcttagcggtaacagcgatctcaacgaaaaactgcgtgaacgtctggaacaggcggaagcggagcgtacccgcgctcgcgaagcgttgcgcggtcacgcagcgcagttgagtcagtacaaccaggtgctggctagcctgaaaagttcttacgacaccaaaaaagagctactcaacgatctgcaacgtgaattgcaggatatcggcgtgcgtgctgatagcggggcagaagagcgggcgcgtattcgccgtgacgagctgcatgcgcaactgagcaataaccgtagtcgccgcaatcaactggaaaaagcgcttaccttctgcgaagcggagatggacaacctgacccgcaaactgcgcaagctggagcgggattactttgagatgcgcgagcaggtagtgaccgccaaagcgggctggtgtgcggtgatgcgcatggtgaaagataacggcgttgagcgccgcttacaccgtcgtgagctggcttatctctccgctgatgatttgcgttccatgagcgataaggcgttaggtgcgctgcgtctggcggtggcggataacgaacatctgcgcgacgtgctgcgcatgagcgaagatccgaaacgtccggagcgtaaaattcagttcttcgtggcggtttatcagcatctgcgtgaacgtattcgtcaggatattattcgtaccgatgatccggtggaagctatcgaacagatggagattgaacttagccgtctgaccgaagaattaacctcccgtgaacagaaactggcgatcagttcccgcagcgtggcgaacatcattcgcaaaaccattcagcgcgagcagaaccgtatccgtatgctcaaccaggggttgcagaacgtaagctttggtcaggtgaacagcgtgcgtctcaacgtgaacgtgcgtgaaacgcacgccatgctactggatgtgctctctgaacagcacgagcagcatcaggatctgtttaacagcaaccgtttgaccttcagcgaagcgctggcgaaactgtatcaacgtcttaacccgcagattgatatggggcagcgcacgccgcagaccatcggtgaagaactgctggattaccgcaactatctggaaatggaagttgaggttaaccgtggttccgatggctggctgcgcgcagagtctggtgcattgagcaccggtgaggcgattggtaccggtatgagcattctggtgatggtggtacaaagctgggaagatgaatctcgccgcctgcgcggtaaagatatctctccttgccgcctgctgttcctcgatgaagcagcgcgactggatgctcgttctatcgccacgctgtttgaattgtgtgagcgtttgcaaatgcaactcatcatcgcagcgccggaaaatatcagcccggagaaaggcaccacctataaactggtgcgtaaagtcttccagaataccgaacacgttcatgtcgtcggcctgcgaggatttgcgccgcaactccctgaaacgcttccaggaactgacgaagcgccttctcaggcgagttaaaattaaggcggcagcaatgccgccttttctttttccgaaaactccgtttctgcactaaaaaagtggcacattacggcgcgcttttctttaaacttctttacattaggttatgtaaaaacgtatcggcgtttatatactgaagataagcctgatgagtaacaggcttgctcgtcatactttcgtgagtattggcgttgtacaggcaagtcgtaaaataacagcctggctattcagagtatgataaaaacagggggcaagggatgttgcttaatatgatgtgtggtcgtcagctgagcgcaatcagtttgtgcctggccgtaacattcgctccactgttcaatgcgcaggccgatgagcctgaagtaatccctggcgacagcccggtggctgtcagtgaacagggcgaggcactgccgcaggcgcaagccacggcaataatggcggggatccagccattgcctgaaggtgcggcagaaaaagcccgcacgcaaatcgaatctcaattacccgcaggttacaagccggtttatcttaaccagcttcaactgttgtatgccgcacgcgatatgcaacccatgtgggaaaaccgtgatgctgttaaagccttccagcaacagctggcagaggtggcgattgccggtttccagccgcagtttaataaatgggtagagttactgaccgatcctggtgttaacgggatggcacgcgacgtggtgctctctgatgcgatgatgggctatctccatttcattgcaaatattccggtcaaaggcactcgctggctatatagcagtaaaccttatgcacttgcaacgccgccgctcagcgtgattaaccaatggcagctggcgctggataaaggtcaattgcctacgtttgttgcaggactggcaccgcagcatccgcaatatgcggcgatgcatgaaagcttactggccttactctgtgacaccaaaccgtggccccaactgaccggcaaagcaacgttgcgcccagggcagtggagtaacgacgtaccggcgttgcgcgaaatattgcaacgcacaggcatgttggacggggggccgaaaattactctacctggcgatgacacgccaactgacgcggtagtcagcccatccgctgttactgttgaaacagcagaaactaagccgatggataagcaaacgacgtctcgtagtaaacctgcgcctgccgttcgcgccgcctacgataatgaactggtggaagccgttaaacgttttcaggcatggcaaggattgggggcagatggtgctattggcccggcaacacgtgactggttaaacgtaacgcccgcccagcgtgctggtgtgttggctctcaacatccagcgattgcgcttgctgccaacagagctttctaccgggatcatggttaacattccggcctatagcctggtctactatcagaacggcaatcaggtgctggatagccgagtcattgtcggtcgccccgatcgcaaaacgccgatgatgagcagtgcccttaacaacgtagtggtaaacccgccgtggaacgtacctccaactctggcacgcaaagatattctgccaaaagtgcgcaacgatccgggatatctcgaaagccatggctatacggtgatgcgcggctggaacagcagagaagcgattgacccatggcaggttgactggtctacaatcacggccagcaatttaccgttccgcttccagcaggctccaggcccacggaacagcctggggcgctataaattcaatatgccgagtagtgaggccatttatttgcatgacacgccgaaccacaatctgttcaagcgtgatacacgcgcattgagcagtggctgtgtacgagtgaataaagcttccgatctggcgaatatgctgttgcaggatgcaggctggaatgacaaacgtatttctgatgcgctgaagcagggtgatacacgttacgtcaatattcggcagagcattccggtgaatctctactacctgacggcctttgttggtgcagatggtcgtacccagtatcgtacagatatttacaattatgatctgcctgcgcgatccagcagccaaatcgtaagcaaagcggaacaattaatcaggtaaatgaagtagttcggggaaatcagttgtcgtaataattagcatgattgggggcgattctctgcagcccccgtcactgctggggttgagtcatcttgacgtctgctttacgggcggttaaggtgcctcttgtgcgccagaagtgcatataaacgataacattgacctgtagacttgattatcatggacaaattcgacgctaatcgccgcaaattgctggcgcttggtggcgttgcactcggtgccgccatcctgccgacccctgcgtttgcaacactctctaccccacgcccgcgcattttgacactcaataatcttcataccggagagagtatcaaagcggagtttttcgatggcagaggctatattcaggaagaattggcaaaacttaaccattttttccgcgattaccgcgcgaacaaaataaagtccatcgacccaggattattcgaccagttgtatcgcctgcaagggttgttaggcacgcgcaaaccggtgcaactcatttccggttatcgttctattgataccaacaatgaactacgcgcccgcagccgtggagtagcgaagaaaagctatcacactaaaggccaggcgatggatttccatattgaaggtatcgcgttaagcaatattcgcaaagccgcgttatctatgcgcgcaggtggtgtaggatattatccacgtagtaactttgtgcatattgataccgggccagcacggcactggtaataattgcttaacgaaacaggggcagtatgaactatcgtattattccggtcaccgcattctcccagaactgtagtttaatctggtgtgaacaaacccgtctggccgcactggtcgatcctggcggcgatgcggaaaaaatcaaacaggaagttgatgacagcggcctgacactgatgcagatcctgctgacgcatggtcatctggaccacgttggcgcagcggcggaactggcgcaacattacggcgtgccggttttcggcccggaaaaagaagatgagttctggctgcaaggcttgcctgcgcaaagtcgtatgtttggtctggaagagtgccagccgctgacgccagatcgttggctgaacgaaggcgataccatcagcatagggaatgtgactttacaggtgttacattgccctgggcatacgccgggtcatgtcgtgttttttgatgatcgggcaaagctgctgatttctggcgatgttattttcaaaggcggagtagggcgcagtgacttcccgcgtggcgatcataatcaactgatttctagtatcaaagataaattgctgccactgggggatgacgtgatatttattccgggtcacggaccattatccacacttggttatgaacgcctgcataatcccttcctgcaagacgaaatgcccgtctggtaaggcacataaaaaagcccgcttttaatgctggcctggatttctggcaaagtgcgctttgtttatgccggatgcggcacgagcgccttatccggcctacaaaatcgtgcaaattcaaaatattgcaggggacgcgtaggcctgataagcgtagcgcatcaggcaatgttgcgtttgtcatcagtctcagcccgcttttcagcgggcttcattgtttttaatgcttacagcactgccacaatcgcttcgcacagcggagccatgttatctggtgtcatcccggccacatttacgcgaccagaagcaaccgcatatacgccaaactcttcgcgcagacgcagcacttgttcttttgtcaggccactgaaggagaacatgccgttctgtttgatgataaagctgaagtcgcggtttgcgcctttttcctgcagcgtattgacgaacaactgacgcatacgctgaatacgctggcgcatatcagtcagctcttgttcccaaatcgcacgtaacgcatcgttgctcaggatggtggcaacaacagaagcgccgtgtgctggtgggttagagtagttagcgcgaatcgccgctttcatttggctgaatgcgcgatcaacggtttcactgtcggcagcaaccagagtacaagcgccaacacgctcgttgtacaggccaaagtttttagagtaggaactggcaacaatcagctctttatgcatagccgcgaaagcgcgcagtccttcagcatcttcttccagaccacgggcaaaaccctggtaagcgaagtcaaacagcggtaaccagcctttctcaacggagagttgtgccagtgtttgccattgttccagcgtagggtcgataccggttgggttatggcagcagccatggaacagcactacgtcgccagcctgagcttcattcaggctgttaatcagtgcatcgaagtcaagagtgtgattttccgcatcataataagcgtattcacgaacttccagacctgcagagttaaagacgctcttatggttcggccagcttgggttgctcacccacacacgcttaacgctggtattttttgccaggaaatcggcagccacgcgtagtgcgccagtgccccccggagtctgtgccgtgcgagcacgtttgtcattgatcagggcgctacctttaccaaacagcagttcctgagtgcagcgaccaaattcagggatgccgtcaatgccgaggtaatttttggtggtttcattttcgagcagatactgttcagcctttttcacgctggtcagtaccggggttttgcccgtctcatctttatagacaccaatcccgaggttaattttgccgggacgttcatcggcacgaaacagatcggccaggcccagaatcgggtcggcaggagcggcggtaatgttctcaaacatgacgaggttccattatggttacagaagggaagtccgctatcagggtaacgggagatttacaaaattccaactattactgatgaaaacgcaggctgtttttgcaagacgtgagattgctctggaaggtataaaaaaaacaggaccaaagtcctgttttttcggcatttaacaaagaggtgtgctattagaactggtaaacgatacccacagcaacggtgtcgtcactacctacgcccagtttgttgtcagaatcgatctggttgatgatgtagtcaacataggtggacatgtttttgttgaagtagtaggttgcgcccacttcaaagtagttcaccagatcaacatcaccgataccttctacgtctttcgctttagatttggtgtaagcgatggacggacgcagaccgaaatcgaactggtattgcgcaactaacagaacgtcttgcgttttgttggcgaagccgctggtgtttgtaaatttattagtgatcggcgtagcgttacgggtttcaccgtagttcgctgccaggtagatgttgttcgcgtcgtacttcagaccagtagcccactgttcagcttttttaccgttgccaagaggttgagcttcttgcaggttggtacggtcagctgcaccataagcaccaacgataccaaagccttcgtattcgtagctgatagaaccgccaacaccgtcgccgttagaacggcgtgcagtgtcacgctcgtttttacccaggtactgaacagcgaagttcaggccatcaaccagaccaaagaagttggagttacgataggtagcaacgccgccaacacgaccaacgaagaagtcatcgctgtatgcagtatcaccaccaaattctggcagcatatcggtgtaacccagtgcatcataaaccacaccgtagttacggccgtaatcgaaagaaccaacgtcagcgtatttaagacccgcgaatgccagacgcgttttgttaccagtttgagcgtcagcgccttcagagttgttaccctggaagttatattcccactgaccataaccggtcagatcggaattgatttgagtttcccctttaaaaccaagacgggcataggtcatgtcgccattgccaccgtaactgttttcaccgttacccttggaaaaataatgcagaccaacagctttaccgtacagatctactttgttgccatctttgttatagatttctgcagcgtttgcagtacctgctactaacagagcagggacgatcactgccagaatattgcgcttcatcattatttattaccctcatggttttttttatgacacctgccactgccgtcaataagttctgtcaataaaaatttacggaactattgatgagagtttggtgtctttatgtgtctgcaggcatctttccattcaaactaacgtttcgctaccgtgaaagtgctacaaagataaagatttggtttcaaaaagaaaaaatatgtaaccaaaagtaaaatttaaggaactttgtgaacaccgtcatatttccatagagacgtgatgatatttacagcaattttaatctatttatatgatttccttatatttaaattaactaaacggaaattttgtttctgatggaaactttatcgacctggcacaaaatcttctttcagacatccagaatgccaaaaaatagtatgaaaattgtgctattagctaagaaaaaactaatccgcaataagaatgcggattagtttttgcgcgtaaatgttgcaatgtaatattccgtaacaggatgatcgttatggcggggttgcaaatagattgcttgacttaacaaacagataacttgacagaaaagataaaaaaagagccagcgggcgctggctcttgaagacgctaaattagaagctggcgttacgcggagtacgtgggaacggaatcacatcacgtacgttttgcacgccagttacgtaagcaatcagacgttcaaaaccaagaccgaaaccactatgcggaacagtaccgtagcgacgcagatcgcgataccaccagtaatcttctttattcaggcccatttccagcatacgctcgtccagcacgtccagacgttcttcacgctgggagccaccaatgatctcaccgatgcccggagccagaacgtccatagccgcaacggttttaccgtcttcgttaaggcgcatatagaacgctttaatatctttcggatagtttttaaccactaccggtgctttaaagtgttcttccgccagataacgctcatgctcagaagagagatcgactccccagtaaaccgggttttcaaacttcctgccgcagttttcgagaatggtcactgcgtcggtataatccacctgcgcaaaatcggcttcaatgaagcgttccagacgactaacggcatctttatctacgcgttcagcgaagaatttcatgtcgtcagcgcgttcttcgagaaccgctttgaagacatatttcagcatggcttcagccagacccgcaatatcgttcaggttagcaaacgccacttccggctccagcatccagaattccgccaggtgacggctggtgttggagttttcagcacggaaagtcgggccgaaggtataaattttggacaatgcgcaagcgtaggtttcgccgttcaactggccagatacggtcaggaaagactctttaccaaagaagtctttgtcgaaatccactttgccctgatcgttacgcggcaggttttccagatccagcgtagaaacgcggaacatttcgcctgcaccttcggtatcagatgcggtaatcagactcgtactaacccagaagaatccctgctcgttaaagaagcgatgcagcgcctgcgccagcgtatggcgaacgcgcgcgacggcaccaatcaggtttgtgcgcggacgcaggtgagcgacttcacgcagatactcaatgctgtggcgttttgccgccatcgggtaagtgtctggatcttcaacccaaccagcaacttcaaccttgctggcctgaatttcaaattgttgcccctggcccgggctcgccacgactttacccgtcacaatgacgctgcagccggtggtcagacgcaggacgtcttcattgtaattgggcagagaattattgatgacagcctgtacaggatcaaagcaggaaccgtcataaacggcgaggaaggagatgccagctttactatctcggcgggtacgtacccatccgcgcacggtgacttcgctgtcaacggctacacggccctggagtacgtcggctacaggcacaacgctcataatattctctctgttaatagtcggaaaaaataaacacttgtccacccgtaaatggggggatacctatgttacctggcatctgcaatcagacaagcagaattcgcaaatgcagcgaaagatttcggaattaaaggtaaaaaaagggagccgattagctccctgatgatattaactggcttttttaatatgcggaaggtcgaacgctttgcgcagcgcccgaacaaacgctttatcatggcagatagttttgccagggctgtcagaaagtttcgccaccggtttaccgttacactctaccaacttaatgacaatattcaggggttttacctgggggatatcgcaggtcaggcgagtcccaataccaaaacttaattgcacgcgggaagagaagtggcggtatagctcaaccgctttgcgtaaatccagattgtcagagaaaaccagcgttttactctgtggatcaattcccagcttttcataatgtgcaatggctttttcaccccattcaaccgggtcgccagagtcatgacgcaggccctgataccgactagcgaactcgacaccgaaatcacgcaggaaagcatccatagtgatgcagtcggttaatgcaatgccaagttggtcgggatactcttccagccaggcagcaagtgcagctcgctggctgttggctagatccgggctgatttgctgatgtgcctggaaccattcgtgtgcctgtgttcccatcggcgtgagggaaagccgacgcgccagatcgtagttgctggtgcccacaaaccaggattcctgttgcagacgcttaacgatggtttcttgtacttcgcgagaaaaacggcgacgggtgccaaaatccatcagatggaagcggctcatatcaagaccggcggttaacgcgctgaagtcgactaatttgctttccagcgtgtcgagggcttgcgcaacgtcggcctgcggactgcgatagcgatgtaccatttcactgataaccgccagcaaaggaacttcccagaggatgacttcacgccacgggccgcttaaacgaatatccagcttgccattatcgttggacacggtgacttgttccgggttaaagcggaactcgcgtaaccagttaagatagtcggccttaaagaaaggcagggcagaaagccactgatattcatcatcctgcaggcgcaggtgctgcatcgcctgaacctgttcacgaatagcatcggcataaatacccagcagatcgtcacctcggcaacgaaactccgccgcgacatgcacatcgtaatagtgatgaaacacggcttgctgcatatgcaacttataagcatctgtatccagcaagctgtgcagaacaggagaagcgaattgtgtcataggtgcgcagtagcgtcctcgtacaggagcgtttagtacaataaacatcttcaggaactgctggagtataccttgtttcgcaatttattgaaccccgatcacaccatatgccacctttctggtcgatggcattacgcggtgtatgttataaaaatgtagcaataaaggcgtttgtacctgaaaagatgaagattctgcatagcgcgatttacgcaacaggaatagactgaacaccagactctataaaagatgctaaaggttatttatgactcaacagccacaagccaaataccgtcacgattatcgtgcgccggattaccagattactgatattgacttgacctttgacctcgacgcgcaaaagacggtcgttaccgcggtcagccaggctgtccgtcatggtgcaagtgatgctccccttcgtctcaacggcgaagacctcaaactggtttctgttcatattaatgatgagccgtggaccgcctggaaagaagaagagggcgcactggttatcagtaatttgccggagcgttttacgcttaagatcattaatgaaataagcccggcggcgaataccgcgctggaagggctttatcagagtggcgatgcgctttgcacccagtgtgaagccgaaggtttccgccatattacgtattatctcgaccgcccggacgtgctggcgcgttttaccaccaaaattattgccgataaaatcaaatatcccttcctgctttccaatggtaaccgcgttgcgcaaggcgaactggaaaacggacgccattgggtacagtggcaggacccgttcccgaaaccgtgctacctgtttgcgctggtggcaggcgactttgatgtactgcgcgatacctttaccacgcgttctggtcgcgaagtagcactggagctgtacgtcgatcgcggcaaccttgatcgcgcgccgtgggcgatgaccagcctgaaaaactccatgaaatgggatgaagaacgctttggcctggagtatgacctcgacatctatatgatcgtcgcggtggatttcttcaatatgggcgcaatggagaataaggggctgaatatctttaactccaaatatgtgctggcccgcaccgacaccgccaccgacaaagattacctcgatattgaacgcgttatcggccatgaatatttccataactggaccggtaaccgagtgacctgtcgcgactggttccagctcagcctgaaagaaggtttaaccgtcttccgcgatcaggagttcagctctgaccttggttcccgcgcagttaaccgcatcaataatgtacgcaccatgcgcggattgcagtttgcagaagacgccagcccgatggcgcacccgatccgcccggatatggtcattgagatgaacaacttctacaccctgaccgtttacgagaagggcgcggaagtgattcgcatgatccacaccctgcttggcgaagaaaacttccagaaagggatgcagctttatttcgagcgtcatgatggtagtgcagcgacctgtgacgactttgtgcaggcgatggaagatgcgagcaatgtcgatctctcccatttccgccgttggtacagccagtccggtacaccgattgtgaccgtcaaagacgactacaatccggaaaccgagcagtacaccctgaccatcagccagcgcacgccagccacgccggatcaggcagaaaaacagccgctgcatattccgtttgccatcgaactgtatgataacgaaggcaaagtgatcccgttgcagaaaggcggtcatccggtgaattccgtgctgaacgtcactcaggcggaacagacctttgtctttgataatgtctacttccagccggtgcctgcgctgctgtgcgaattctctgcgccagtgaaactggaatataagtggagcgatcagcaactgaccttcctgatgcgtcatgcgcgtaatgatttctcccgctgggatgcggcgcaaagtttgctggcaacctacatcaagctgaacgtcgcgcgtcatcagcaaggtcagccgctgtctctgccggtgcatgtggctgatgctttccgcgcggtactgcttgatgagaagattgatccagcgctggcggcagaaatcctgacgctgccttctgtcaatgaaatggctgaattgttcgatatcatcgacccgattgctattgccgaagtacgcgaagcactcactcgtactctggcgactgaactggcggatgagctactggctatttacaacgcgaattaccagagcgagtaccgtgttgagcatgaagatattgcaaaacgcactctgcgtaatgcctgcctgcgtttcctcgcttttggtgaaacgcatctggctgatgtgctggtgagcaagcagttccacgaagcaaacaatatgactgatgcgctggcggcgctttctgcggcggttgccgcacagctgccttgccgtgacgcgctgatgcaggagtacgacgacaagtggcatcagaacggtctggtgatggataaatggtttatcctgcaagccaccagcccggcggcgaatgtgctggagacggtgcgcggcctgttgcagcatcgcagttttaccatgagcaacccgaaccgtattcgtagcttgattggcgcgtttgcgggcagcaatccggcagcgttccatgccgaagatggcagcggttacctgttcctggtggaaatgcttaccgacctcaacagccgtaacccgcaggtggctagtcgtctgattgaaccgctgattcgcctgaaacgttacgatgccaaacgtcaggagaaaatgcgcgcggcgctggaacagttgaaagggctggaaaatctctctggcgatctgtacgagaagataactaaagcactggcttgataaataaccgaatggcggcaatagcgccgccattcggggaatttacccctgttttctcaggcgagtttcagattcaccacgttgcatcacccgttgcaacacctccgcttccagctccgctaatcgcacgctccctaatcgacgcggacgggggatatccactgtcaaatccagaccaatttttccctcttcaattaacagcacccggtcagccatcgctaccgcttcgctcacatcatgcgtcaccaacagtacggtaaagccgtgctcctgccaaagactcacaatcaaatcctgcatctcgagtcgcgttaaggcgtccagcgccccgagcggttcatcaagcaacaataatcccggtcgatgaatcaacgctcttgccagcgccactcgctgtttctgcccgccagaaagtgcggcaggccattcccctgcgcgattctccagtcctaccgcagccaacgctcgacgtgcggcatcgcgccactggcctttaaggcctaacccaacgttatcaatcacgcttttccacggtagcagacgcgcatcctgaaacatcattcgcgtgtcttcctgaatttcagccagcggtgtggtgcccgctaacacatcgcctgcggttggcgtttccagacctgccagcaggcgcagcagggtacttttgccaccaccgctgcggcccaccaccgccacaaactgacctgccggaatatgtaaatccagttggttcaggacgatattttccgcgtaatgtttgcttactgcattgagcaacaatggcgtgccctggttcagacgagcagtattcataccgtggcctccttcaaatgataagccgggttccagcgcaaccagaggcgctctaacagctgcgcgctgacgtcagccagtttgccgagcagggcgtaaagaataatagcgactaccaccacgtccgtttgcaaaaactcccgcgcattcatcgccagataaccaatgccactattggcagaaatggtttcggcaacaatcagcgtcagccacatcaggcccaacgcaaaacgcacgccgaccataatactgggcagggcaccaggcaggatcacatggataaacagcggtatgccggataatccatagctacgcgccatctccaccaacccgcgatcgatattacggatgccatgccaggtgttgatataaatggggaatagcgtaccgagcgccaccagaaagatttttgcggattcatcaatgccaaaccacaaaatcaccagcgggatcagcgccagatgcggcacgttgcgcaacatctgaatactggtatccagcagccgttctccccagcgagatagcccgctaatcagtcccaaaatcaaccccaggcttccgccaatactaaagccaatcagcgcccgccaggagctgatcgccagatgctgccacagttcgccgctggcggagagcgtccagaacgccgtcaccactccttccggactaggcaaaatacgcgtgctcagccagccaacgctggaggccagttgccacaccgccacgatgcccaccggtaaaaaccagggggcaacgcgcaataaccacttcttcactggcgttgccattatttcttccttagctttgcgcgactttacgggggataaaatcattcgccaccgcttcgccttgcggattcagcggctgcggctggggaatttccgggatggcgacatccagaagcgggaacagcaactcgccaacccgatacgcttcttccagatgcggatagccgctaagcacaaaactgtcgatgccaagcgcggcatattcgttgattcgcgcagcgaccgtaggaccatcgcccaccagcgccgtcccggcaccgccgcgcactaagccaacgcccgcccataaattggggctgatctccagattgtcgcgcttgccgttatgtaacgccgccattcgctgttgccctacggaatccgtccgggcgaatgcggcctgtgctttggcgatagtttcatcatcaagatggctgattaaccgctcggcggcctgccacgcttcgtcgttagtttcacgaacaatcacatgcagacgaataccgaaacgaattttgcgtccatgcgcggcagctttcgcccgcacttgttcgattttctctttaaccagttccggcggttcgccccaggtgaggtagagatcaacctgttctgccgccagctcctgggcgacatcactgcttccgccaaagtaaagtggcggatacggctgttgaatcgccgggaagagcagttttgctccgcgcacatgaatatgtttaccgttgaaatcgacggtttctctctgcaataaacgccgccagacctgggtaaattccgcgctggcttcgtagcgctcgctatgatcaaggaacactccgtcgcctgccagctcttgtggatcgctgcctgtgaccaggttaaacaacgcacgtccattactgagacggtcaagcgtggcggcctggcgggcggcaacggtaggactggttacgctgggacgcagggcgacaagaaacttcagccgctgcgtcaccgggatcatgcttgcggcaaccagccacgcatcttcgcaggagcgccccgttggaattagcacaccggtatagccaagacgatccgccgcttgcgcaatttgttgcagataaccgtgatcaaccgggcgactaccttcttccgttcccagataatgcccgtcaccgtgggtcggtaaaaaccagaacatattcagactcataattgttttccttccagttgagtgggctgccagatgcgctggcgaatatcgacttttttcggcaccagacgattttcataaaacagatctgccgtttgctgctgtaaggcggcaacctcggcgttaaccggtttgatggtggtaggagggcgatgatctaagtaagaggcaatcaccggtgccggtaagcccatcgtttttgccagtaaagcgatgctttgctcgcgctggctgcgggttaacgcatcggcctcactaaaggttgccagtacgccctgaataaaagcgccgtttttttctgcatagggacgagctgccagataaaagcttccagtttgattgagatcggtgccgtctttcagcacccgcacgccgccctgtaataatgcagcagagtagtagggatcccagatagcccaggcgtcaacgttaccttgctggaacgcggcgcgggcatcagcgggcgtcaggtaagtgggttggatatcggtaaacttaagtccggcctgacgcagtgcacgcagtaaaaggttgtgactactggaacctttctgaaaggcaactttgtgacctttaagatcggctacggttttgatcgggctgttttctgccaccagaatcacttcggctttgggcttcggtggctcgacgcccacgtacaccaaatcagccccggcagcctgggcaaagattggcggaatatccccggtactgccgagatcaatactgccaacgtttaacgcttccaacatttgcggacccgcggggaactccacccaggagattttactttccggatagcgtttttccagtaactggtggctttttgccagcaccataccaatactgcctttctgatagcctatacgtaacgcttcagggctggattctgcagcaaccgcaaaagtagagacgctaagcaatcccgccagcgccagtttaatgatgttacgcatgggcattacctcgcagagacagaaggtcaggaacctgaacatcgcggcggtgcaatgcctgccagaaagtttctagcgcggtatcaagacgggtttgcagatttggcgtgaactggggtctgtgatggtaatcaattacttgactgtcatcggcaaacacgccgtgcaggatctcctgagctttcagtgcgcttaaaactggtttaagggcataatcgaccgccagcagatgggccacggtaccgcccgtcgccagcggtagcaccactttgccttgcaaagcgcgttctggcagcaggtcgagcagggttttcaacgcaccggaataggcggctttatacacaggcgtggcgacaatcagcccatcggcctgttgcagctgttcggtgaaggtcttgagtgccggactatcgaaacgagcataaagtagatcttccggggcgaagttttgcagattccagtgataaacctctacatccaggccatttagtttttcccgcgcatattccagcaaggagctggagcgagaaggaaagcgaggactacccgccagggtgatgacacgcatactctctccttataaccaattgttctttttttgttaacattgataacaattcggtcagtctgtcggagagacaagaaaattccaaatataaattttgtgtatctttttctgaaaataaactaaagaaagggctttatatatcacgcatatttatttattggatagtcattagatgttgaatcaatgaattactcgttcagttaatatttaaatattcatgaaatctataaattaaagatttgtcacttattggatttagtatgcttgatttaaatggcggacaattattgttattattaagtctaatgtcatttaaaggcattatcatatttacgaagagatcaggatgataacgatgaaaaaaagtgtattgacggcgtttataactgtggtatgtgcaacgtccagcgttatggctgctgatgataatgctatcacggatggcagtgtaacatttaatggtaaagttattgctccagcttgtaccctggtagctgcgacgaaagattccgtggtgactttgccagatgttagtgccacgaagttgcaaaccaatggtcaggtttctggcgtgcaaattgatgtgccaattgaattaaaagattgtgatactaccgtaacaaaaaatgcaacgttcacctttaatggcactgcggatactactcagattacagcgtttgctaaccaggccagttctgatgctgctacaaacgtggccctgcaaatgtatatgaatgatggtacaacggccatcacgccagacacagaaaccgggaacattttgttgcaggatggagatcagacgttgacttttaaagttgattatatcgctacggggaaagcgactagtggtaatgtgaatgcggtaacaaatttccatattaactattattaatagaactcattaattgttttattaattagtacccctccagtgttctggaggggatattcatattttttaagagtgactatttatgaaaacttgcataacaaagggaattgtgaccgtaagtttaacggcaatattactcagctgcagttccgcatgggcggcaggtaaaggcgggattggacttgcagcaacacgtcttgtttatagtgaaggtgaagagcaaattagtctgggtgtacgtaacaccagtccggatgttccttatcttattcagagttgggtgatgaccccagataataaaaaaagtgcagactttattattacaccaccgctatttgtgctgaatccggcaaatgagaatctgttacgcattatgtacattggagcgccgttggcgaaagacagagaaacccttttcttcactagcgtacgggcagtccctagtacaacgaagcggaaagagggaaataccctgaagattgccacacaaagcgtcatcaaacttttctggcgaccaaaaggtttagcgtatcccttaggcgaggctccggcgaaactgcgttgcactagcagtgctgacatggttacggtcagtaacccaacaccttatttcattaccctgacagacctgaaaataggtggaaaagtagttaaaaatcaaatgatttccccctttgataaataccaattttctctgccaaagggggccaaaaatagcagcgtaacgtatcgaaccatcaatgactacggggcggaaacgccgcaactcaactgtaaaagctaagccgtcttcagttaagagagcgagatgtatagaactcatcgacaacacagcctgttaagctctggtggagtgccaagctttattggtgggctggtggtgtttgtgagcgcagcgttcaatgcacaagctgaaacctggttcgatcctgcttttttcaaagatgatcccagtatggtggccgatttgtctcgtttcgaaaaaggacaaaaaataacgccaggggtttatcgtgtcgatattgttctgaatcagacaattgtagatacgcgcaacgtcaattttgttgagataacgccagagaaggggattgccgcctgtttgacgactgaaagcctggatgcaatgggtgttaatactgatgcgtttccggcttttaaacaactggacaaacaagcgtgtgtgccattggcggagattattccggatgccagcgtaacgtttaatgtgaataaactccgtctggaaattagtgtaccgcaaatcgccatcaaaagtaatgcccgtggttatgtcccccctgaacgttgggatgaagggatcaacgcgctattactgggatatagctttagcggggctaacagtattcatagcagcgcagacagtgattctggcgacagctattttctgaatttaaacagtggcgttaatttaggcccatggagattgcgcaacaatagtacatggagtcgtagtagtggccaaaccgcagaatggaagaatctcagcagctatttgcaacgggcggttattcctctgaaaggcgaactgaccgtaggtgatgattatactgcaggcgattttttcgatagtgtcagctttcgtggtgtgcagctggcgagtgatgacaacatgctgccagacagcctgaaagggtttgcgcctgtggtgcgtggtatcgccaaaagcaatgcccagataacgattaagcaaaatggttacaccatttaccaaacttatgtaagccctggtgcttttgaaattagtgatctctattccacgagcagcagcggtgatttgttagttgaaatcaaagaagcggacggcagcgtcaatagctacagcgtaccgttctccagtgtgccattactccagcgtcaggggcgaatcaaatacgcggtgacactggcgaaatacagaaccaatagtaatgaacagcaggagagcaaatttgcccaggccacgttgcagtggggcggaccgtggggaacgacctggtatggtggtggacaatatgctgaatattaccgtgccgccatgtttggtctgggatttaacctcggcgatttcggagcaattagcttcgatgcgacccaggcgaagagtacgctagcagatcaaagcgaacataaaggtcagagttatcgttttctgtatgccaaaacgctcaaccacttgggcactaactttcaattgatgggctatcgctatagcacgagcggtttctacaccctttccgacaccatgtataaacatatggatggctacgaatttaatgacggtgatgatgaagatacgccgatgtggagccgttattacaatttgttttacaccaaacgtggcaaactgcaggtcaatatctcccagcaattaggcgagtacggtagcttttatttaagtggtagccagcaaacttactggcatacggatcaacaggatcggctattacagtttggctacaacacgcaaattaaagatcttagcctggggatttcctggaactacagtaagtcccgtggtcaacctgatgctgatcaggtgtttgctctaaatttttccctgccgctcaatctgttgctccccagaagtaatgatagctataccaggaaaaaaaattacgcctggatgacctctaacaccagtatcgataacgaagggcacactacacaaaacctgggtttaacggagacattactcgatgacggtaacctgagctacagcgtgcaacagggatataacagcgaggggaaaacggctaatggtagcgccagcatggattacaaaggggcgtttgcggatgcccgagtgggctacaactacagcgataacggcagtcaacaacaactgaactacgctcttagtggcagtttagttgcccatagtcagggcattaccctggggcaaagcctgggggaaactaacgttctgattgcagcaccaggcgcagagaatactcgtgtggcgaacagcaccgggctgaaaactgactggcgcggatataccgttgttccttatgccacttcttatcgggaaaatcgaatcgcacttgatgcggcgagcttaaaacgtaacgtggatcttgaaaatgcagtagtcaacgtggttcccaccaaaggggcgttggttctggcggagttcaatgcccatgcgggtgcaagggtattaatgaaaacaagtaagcagggtataccgctgcgttttggcgcgatagcgacgctggacggcgtacaggctaatagcggcataattgatgatgatggcagcctctatatggcgggtttaccggcgaagggaacaataagcgtgcgctggggcgaagctcccgatcaaatttgtcatatcaattacgagcttaccgaacaacaaattaactctgcgattacgcgaatggatgccatatgcagataatctttggagaaaaatgcgtgagtttactacgactattttttgccgccgtcttaatgttatggtgcgctcaaaccgctgcttatagcgggcagtgtcatactactcaggggaatccgtatattggcgtcaattttggcgttaaaaccctggaggaagaagcaaatacggcaggggtagttaaagacaaattttatcagtggaacgaaagcaatgattattatgtttcctgtgattgcgataaagacaatgtcagaagtggccgatgggcattcgccgcggatagtccgttagtctatttaggcgacaactggtacaaaattaatgactatcttgccgccaaagttttattgcaggttaaaggcagttctcctactgcggttcctttcgaaaacgtgggcacagggggggatacccgatggcatatttgcgaccctggcggtcaacgtttaggtgggcagggggcaagcggtaatagcggtagcttttccctgaaaatattgcagccgttcgttggcagcgtcgtcattcctcctatggcgctggcgcgattatatgaatgctacaacatacccgcaggtgattcctgcacgactacaggtacaccggttttagtgtattacctgtctggtacgatcaatagtcttggcagttgttccgtcaatgccggagagacaattgaagttgatttaggtgatgtcttcgctgccaatttccgtgttgtagggcataaacctcttggggccagaacggcagaacttgcaattccagtcaggtgtaacacgggaaacgcgggattagttaatgtcaacctgagtctgacggcaaccacagaccccagctatccccaggcgattaagacgagtcgtcctggcgtgggcgtggtggtgaccgatagccagaacaacattatttcccctgctggtggaacattaccgctctctattcctgatgatgcagacagtatcgcgcgaatgaatgtctatccagtcagcacgacaggtgtaccaccagaaaccgggcgatttgaagccacggcaacggtgagaataaattttgattaacgcgtgaacgtatgaagaaaaaaacgatatttcagtgcgttatcttgttctttagcattcttaacatccatgtcgggatggctgggcctgaacaagttagtatgcatatttatgggaatgtggtcgatcagggctgtgatgtcgccaccaaaagtgcattacaaaatattcatattggtgattttaatatcagtgattttcaggccgcgaataccgtaagcactgctgctgatttgaatatcgatatcaccggttgtgccgctggtattactggcgcggacgtcctttttagcggcgaggctgacacccttgcgccgacactgctcaaactaactgacacaggcggaagcggtggtatggcaacggggattgccgtgcaaattcttgatgcgcaaagtcagcaagaaatcccgctcaatcaggtccagcctcttacgcccttaaaagccggggataacacactcaaatatcaacttcgttataagtccacaaaggcgggagcaacgggcggtaatgcgacggcggttctctattttgatctggtttaccagtgaaggagtgatgttgaaacggataatctggattctgttcttattgggattaacgtggggctgtgagctatttgcccatgatggcacggtcaacattagcggaagctttcgccgtaatacatgcgtgctggcacaggatagcaagcaaatcaatgtgcagttaggcgatgtcagcctgacacgtttttctcatgggaattatggcccggagaaatctttcatcattaatttgcaggattgcggaacagatgtcagcacggttgacgtcacctttagtggaacccccgacggagtgcagagcgaaatgttgtccattgaaagtggtacggatgcagccagcgggctggcaattgcgattctggatgatgcgaagatattgattccgcttaaccaggcgagtaaagactacagcctacatagcggtaaggtgccattaactttttatgcgcaattgcgacctgtcaatagcgatgtgcagagcggtaaagtgaatgccagcgcgacatttgtacttcattatgactaatacgtggaacagattggcgctcttgattttcgccgttttaagcctgctggtggcgggtgaattgcaggcaggagtggtggtcggcggaacgcgatttatctttccggcagacagagaaagcatatctattttactgactaataccagtcaggaatcctggcttattaacagtaaaatcaaccgcccaacgcgttgggccgggggggaagcgagcacagtgccagcaccattactggccgctccgccacttattctcctgaagcccggtacgacaggcacgttgcgcttgctgagaacggaaagcgacatcttgcctgtggatcgcgaaacgctatttgagttaagcattgccagcgtgccatccggcaaagttgaaaatcagagcgtaaaagtggcgatgcgcagcgtatttaaactgttctggcgacccgaaggtttgccgggcgacccgctggaagcttatcaacaattacgctggacacggaatagccagggtgtacaactcactaacccaacgccttattacattaacctgattcaggtgagtgtaaatggtaaagcgttaagtaatgtgggagttgtgccgcctaaaagccagcgtcagacaagctggtgtcaggcaatcgcaccgtgtcatgtcgcctggcgggcgataaatgattacggcgggttgagtgcaaagaaggagcaaaatctgccctgaaacaggttcggaaaacgtttgcgttttttttgccgcaggtcaattcccttttggtccgaactcgcacataatacgcccccggtttgcacaccgggaatccaggagagttcatgtactaccccttcgttcgtaaagcccttttccagctcgatccagagcgcgctcatgagtttacttttcagcaattacgccgtattacaggaacgccgtttgaagcactggtgcggcagaaagtgcctgcgaaacctgttaactgcatgggcctgacgtttaaaaatccgcttggtctggcagccggtcttgataaagacggggagtgcattgacgcgttaggcgcgatgggatttggaagcatcgagatcggtaccgtcacgccacgtccacagccaggtaatgacaagccgcgtctctttcgtctggtagatgccgaaggtttgatcaaccgtatgggctttaataatcttggcgttgataacctcgtagagaacgtaaaaaaggcccattatgacggcgtcctgggtattaacatcggcaaaaataaagatacgccagtggagcagggcaaagatgactatctgatttgtatggaaaaaatctatgcctatgcgggatatatcgccatcaatattagtagcccgaataccccaggattacgcacgctgcaatatggtgaagcgctggatgatctcttaaccgcgattaaaaataagcaaaatgatttgcaagcgatgcaccataaatatgtgccgatcgcagtgaagatcgcgccggatctttctgaagaagaattgatccaggttgccgatagtttagttcgccataatattgatggcgttattgcaaccaataccacactcgatcgttctcttgttcagggaatgaaaaattgcgatcaaaccggtggcttaagtggtcgtccgcttcagttaaaaagcaccgaaattattcgccgcttgagtctggaattaaacggtcgcttaccgatcatcggtgttggcggcatcgacagcgttatcgctgcgcgtgaaaagattgctgcgggtgccagtctggtgcaaatttattctggttttatttttaaaggtccgccgctgattaaagaaatcgttacccatatctaattatttcttcgaattcctctttataagataatcagggctttattttcagccctggttgttttatattcatcgctgttgcttatttagacattttgtacttttattgttgaggttattaagcgaagcgacaatggattgtgttgctgcggttttatagggtaggggagaggcagatgcgaattaaaccagacgataactggcgttggtattacgatgaagagcacgatcgaatgatgctcgatttagccaatggtatgctatttcgcagtcgttttgcgcgcaagatgttgactccagatgccttttctcccgcaggcttttgcgttgacgacgccgcgctctatttctcttttgaagaaaagtgccgcgattttaatttatctaaagaacaaaaagccgaactggtgctgaatgcactggtagcaattcgctatctcaaaccgcaaatgccgaaaagctggcattttgtttcccatggtgaaatgtgggtgcccatgccgggcgatgcggcctgcgtttggttgagcgatactcacgagcaggtcaatttgctggtcgttgaatctggcgaaaatgccgcactatgcctgctggcacaaccctgcgttgttattgcgggtcgcgcgatgcagttgggcgacgccattaaaatcatgaacgacaggctgaaaccgcaggttaatgttgacagcttcagcctcgaacaggcagtttaacgcgccaacttaagtgcagtcttcggtacacagctacagcaaagaatggtgccatcatcgcccattgcactttttttcagcggcgtgacttcgccttctaaaagctgaacacggcaacttccacaaatgcccgcgcggcaagaataagggatacgaattccctgattttctaattgctccagcaacacctgttggttatttccacgaaatgcctgtccctgccagtcaatatctacatttgcgtccggttgttgcgtgatgttggcggtatcatcagcggcagctgcgccgtaaatttttgccggagccgttgccagaatttccacctcatcgccaacgcgaatcacgccgctattacgggcaattaaattctgaccaaaatcgacatcgccgttatcctgggcagtgcggaaagattgcaatgtttttaatggttcgcctgccggatgtttttgccctttttctgggctgacggtggtgaaaatacagcggctacaaggtttaaccacatcaaacaccacatcaccaatgcgaatcactttccagcgatcttcttcccaggcactcgcgccggaaaccaccagattggggcggaattgctccatttttacactggccggacaacgttgttggagatcacgtaagctggcttcgttagcaagaaggtaaggatagccatcagcaaaactcagaggtacagtgttgtggcgtttcacgcgccgggtcatttgtggccccacccagcgtaattgcacttcgcgggagaaaaatccacttagccatttgttgatcgcgtctggcgcaattcgcgcggtaaaatgtgtgccccaaacttcggttggtgcgtcttgtgtggcgaaatcagcaaaacgaacatatgcgctactgccatctggtgcggtgagatgcaagccatcatgcacaggactaggagtaaaccgtaccatctggggaaactggcgagcggtaataaacgtaccgtcaggttccgtgatcataaagatgcgatcgaaggccagaccactgacatctgccagagcatgtgtaagaccaatgccgcgcatgcttttaacaggatgaataaaaagccggattaatgtcgccacggtgcggtcctcaaatgaaaataagccctcaactttatgacatgacgcgcttattagctataatgcgcaacaattttcttagcgcctgtcccattaggctattttatttgtcagtttggccctgggttatgctcgaaatcctcacgtacttgtgtacgctccggtttctccgcgctgtccatgtccagactgactgcaacaattacgcctactgcggtaggctcttagagtaaaagtgacgatatgaattctctgtttgccagtacggcccgtgggctggaagagctgttaaaaactgaactggaaaacctgggggccgttgaatgccaggtggttcagggtggggtccatttcaagggcgacacacggcttgtttaccagagcctgatgtggagccgcctggccagccgtattatgttgccgctgggcgagtgtaaggtttacagcgatttagacctctatctcggtgttcaggcgatcaactggacagagatgtttaatcctggcgcgaccttcgctgtccacttcagtggtttgaatgacaccatccgcaacagtcagtacggcgcgatgaaagtgaaagacgcgatcgtcgatgctttcacgcggaaaaatctgccgcgtccaaatgttgatcgcgatgcgccggatatccgcgttaacgtctggctgcataaagaaaccgccagtatcgctcttgatctgagtggtgatggtttacatctgcgtggctatcgcgatcgtgctggtattgcgccgatcaaagaaaccctggcagccgctattgtgatgcgatccggctggcagccaggaacaccgctgctcgatccgatgtgtggttccggtacgttgctgattgaagcagcgatgctggcgaccgatcgcgcaccaggcttgcaccgtgggcgttggggctttagcggctgggcgcagcatgatgaagctatctggcaggaagtgaaagcggaagcgcaaactcgcgcccgtaaaggcctggctgagtatagctctcatttttacggtagcgacagcgacgcacgggtgattcaacgtgcacgcactaacgcccgtcttgcggggattggtgaactgatcacctttgaggtgaaagatgtcgcgcaactgaccaatccgctgccgaaagggccgtacggcacagtgttgagcaacccgccatacggggaacgtctggacagcgaaccggcgctgattgcgctgcatagcctgctgggtcggatcatgaaaaaccagtttggtggctggaatctctctttgtttagtgccagcccggatctgctaagctgcttgcagctgcgtgcagacaaacagtacaaggcgaaaaacggcccgctggactgcgtacagaaaaattaccacgttgccgaaagcactccagacagcaaaccggcgatggtagcggaagactacaccaaccgcctgcgtaagaacctcaaaaaattcgagaagtgggctcgccaggaagggattgaatgttaccgcctgtatgacgccgatctgccagaatataacgttgccgttgaccgttatgccgactgggtggtggtgcaggagtatgcgccgccaaaaactattgatgctcacaaagcgcgtcagcgtctgttcgatattatcgctgcaaccattagcgtactggggattgcgccaaacaaactggtgctgaaaacccgtgaacgccagaagggcaaaaaccaataccagaaactgggcgagaagggcgagtttcttgaagttaccgaatataacgctcacttgtgggtgaacctgacggattatctcgatactggtctgttcctcgatcaccgcatcgcccgtcgtatgctcggtcagatgagcaaaggcaaagatttcctcaacctgttctcttataccggcagcgccaccgtgcatgcgggattaggcggtgcacgcagcaccaccaccgtggatatgagccgtacttatctggaatgggcagaacgcaacctgcgtctgaatggcctgaccgggcgtgcgcatcgcctgattcaggccgattgcctggcgtggctgcgtgaggcaaatgaacagttcgatctgatctttatcgatccgccaaccttctctaacagtaaacgaatggaagatgcgtttgatgttcagcgcgatcatctggcgctgatgaaagatttgaaacgtctgctgcgtgcaggtgggacgatcatgttcagcaacaacaaacgtggcttccgtatggatctcgacggcctggcaaaactgggactgaaagcacaagaaattacgcaaaaaacgctctcccaggatttcgcccgtaaccgccagatccacaactgctggctgattaccgcagcctgaaaggaatagtaatgagtttaatcagtatgcatggcgcatggctgagcttcagcgacgcgccgcttctcgataacgcagaactgcatatcgaagataacgaacgtgtttgtctggtgggccgcaacggcgcaggcaaaagcacgttaatgaaaatcctcaaccgtgaacaagggctggatgacggtcgcattatttacgagcaagatttgattgtagcgcgtctgcaacaggatccgccgcgtaacgttgagggtagcgtttatgatttcgttgccgaaggcattgaagaacaagcggaatatctgaaacgctatcacgatattagccgcctggtgatgaacgacccgagcgagaaaaatctcaacgaactggcgaaggttcaggaacagctggatcaccacaacctgtggcagctggaaaaccgcatcaacgaagtgctggcgcaactggggttagatcctaacgttgcgctgagcagcctttccggcggctggttgcgtaaagcggcattaggacgcgcgctggtgagtaatccgcgcgtgctgttgcttgatgaaccgacaaaccacctggatattgaaaccatcgactggctggaagggtttttgaaaactttcaacgggacgattattttcatctcccacgaccgtagctttatccgcaatatggcgacgcgcattgttgatctcgatcgcggcaagctggtgacctatccagggaattacgaccagtacctgctggaaaaagaagaagccctgcgcgtggaagaattacaaaatgccgagttcgatcgcaaactggcgcaggaagaggtgtggatccgccaggggatcaaagcacgccgtacccgtaatgaaggccgcgtacgcgccctgaaagcgatgcgtcgcgaacgtggtgaacgtcgcgaagtgatgggtaccgcaaagatgcaggtggaagaggccagccgctccggtaaaatcgttttcgaaatggaagacgtttgctaccaggttaacggtaagcaactggtgaaagatttttctgcccaggttctacgtggcgacaaaattgccctgattggtccgaatgggtgcggcaaaaccacgctgctaaaactgatgctcggtcagcttcaagcggacagcgggcgtattcacgttggcaccaaactggaagtggcttatttcgatcagcaccgcgcggaactggatcccgataaaacggtgatggataaccttgccgaaggtaagcaagaggtgatggttaacggcaagccacgccacgtattgggctatttgcaggactttctgttccatccgaaacgggcgatgacgccggtacgtgcgctttctggcggtgagcggaaccgcttgctgctggcgcgtttgttcctcaaaccaagcaacttattgattcttgacgaaccgaccaacgatcttgatgtcgaaacgctggaactgctggaagaactgatcgacagctatcagggcacggtattgctggttagccacgatcgtcagtttgtcgataacaccgttacagaatgttggatcttcgaaggcggcggtaaaattggtcgttatgtcggcggttatcatgatgcccgtggtcagcaagagcagtatgtggcgctcaaacagcctgcggtgaaaaaaaccgaagaagccgccgcggcaaaagcagaaactgtaaaacgcagcagtagcaaactaagctataaattgcagcgcgaactggagcagctaccgcaattgctcgaagatctggaggcgaagctggaagccctacagacgcaagtggcggatgcttccttcttcagtcagccgcatgagcagacgcaaaaagtgcttgctgatatggctgctgcagagcaggagctggagcaagcctttgaacgctgggagtatcttgaagcgttaaaaaatggtggctgatcgcaaaatagtcgatttaaacagagacagctgacaacggtaaaattgcctgatgaactgggtttatcaggcatgaaaaccaacactttgttagtcatctgtaaaatagcgcatcattaaggagtaccaatgtgcgaacatcatcatgccgcgaagcacatcctgtgcagccagtgtgacatgctggtggcgttaccgcgccttgagcatggtcagaaagcggcatgtccccggtgtggcacaacgttaaccgtggcgtgggatgcccctcggcagcgtcccaccgcctatgcgttggctgcactgttcatgctgttgctgtccaacttgtttccttttgtgaatatgaacgttgcaggagttaccagtgaaattacattactggaaattcccggcgtgcttttttctgaggactacgccagcctcggcacctttttcctgttgtttgtgcaactggttcccgcgttttgtctgataaccattctgttactggtgaatcgcgcggaattaccggtccgtttaaaagagcaactggcacgggtgctttttcaactcaaaacctggggaatggcggagattttcctcgcgggtgtgctggtcagtttcgttaaactgatggcttacggcagcattggggtaggcagcagctttctcccctggtgtttattttgtgtcctgcaactgcgcgcttttcagtgcgttgatcgtcgctggttatgggacgacatcgccccgatgccagaactgcgccagccgctaaaaccaggcgtcacggggatacgtcaggggctgcgtagctgctcctgttgtacggcaatccttcctgctgatgaacccgtgtgcccgcgttgtagtaccaaagggtacgttcggcgtagaaacagcctgcagtggacactcgcgctgcttgtaacgtccatcatgctgtatcttccggctaatattttgcccatcatggtgacggatttattaggcagcaagatgccgagcacgattctcgctggggtcattctgttatggagcgaaggctcttatcccgtcgctgcggtgatctttctggccagtattatggtgccaacgttaaagatgatcgccatcgcgtggctgtgttgggatgccaaagggcatggcaagcgcgacagtgaaagaatgcatttgatttatgaagttgttgagtttgtaggccgctggagcatgattgacgttttcgttatcgcggtgctcagcgcgctggtgcgtatgggaggtttaatgagtatttatccggcaatgggtgcattaatgtttgctttagtcgtcataatgacaatgttttctgctatgacgtttgacccgcgtttgagctgggatcgtcaacctgaaagtgagcatgaggagtcctgacagtatggaatctaataatggggaagccaaaatccagaaagtgaagaactggtctcccgtgtggatatttcctatcgtcacggcgctcattggggcctgggttcttttttatcattacagccatcagggaccggaagtgaccctgatcaccgcgaatgcggaaggaattgaaggtggcaaaaccaccattaaaagccgtagcgttgacgtcggcgtggttgaaagcgccacactggctgatgatttgacgcacgttgaaatcaaagcgcggctgaattccggtatggaaaaattgctgcataaagacaccgtcttttgggtggtgaaaccgcagattggtcgcgaagggattagcggcctgggaacgctgctgtctggagtttatatcgaactgcagccaggcgcgaaaggcagcaaaatggataaatacgatttgctggacagcccaccgttggccccgcctgatgcgaaaggtatccgtgtgattctcgatagcaaaaaagccgggcagctcagcccaggagatccggtgctgttccgtggctatcgggtaggtagcgttgaaaccagcaccttcgatacacaaaaacgcaatatcagctatcaactgttcatcaatgcaccttatgaccgactggtgaccaacaatgttcgcttctggaaagatagtggcattgcggttgatctgacgagtgcagggatgcgtgtggagatgggcagtttgacaacgctgctgagtggcggtgtcagctttgatgtgccggaaggtctggatttagggcagccagtggcaccgaaaacagctttcgttttgtatgatgatcagaagagcattcaggatagcttgtacaccgatcacattgattatctgatgttctttaaagatagcgtacgcggtctgcaaccgggagctccggtagagttccggggtattcgcctgggtaccgtaagcaaagtgccattctttgcgccgaatatgcgtcagacatttaacgatgattaccgtattccggtactgattcgtatcgagccagagcggctgaaaatgcagcttggcgaaaatgcggatgttgttgagcaccttggcgaattgttgaaacgtggtttacgcggaagcctgaaaaccggaaacctggtcactggtgcactgtatgttgatctcgatttctatccaaatacgcctgcaataaccggtattcgtgaatttaatggttatcagattatcccgaccgttagcggcggcctggcgcaaatccagcaacgactgatggaagcgttggataagatcaacaaactgccattgaatccgatgattgaacaggcaaccagtacgctttctgaaagtcagcgcacaatgaaaaacctgcaaacgacgctggatagcatgaacaagatcctcgctagccagagcatgcagcagttgccgacggatatgcagagtacgttgcgtgaattgaatcgcagcatgcagggcttccagcctggctccgcagcctacaacaagatggtggcggatatgcagcgccttgatcaggtgttgcgagaactgcaaccggtgctgaaaacgctcaatgagaagagtaacgcgctggtatttgaagcgaaggacaaaaaagatccagagccgaagagggcgaaacaatgaaaaagtggctagtgacgattgcagcactgtggctggccggatgcagctccggcgaaattaataaaaactattaccagttacctgtggtgcagagcggtacacaaagtaccgccagccagggcaatcgtctgttatgggtagagcaggtcactgttcctgactatctggcggggaatggtgtggtttatcaaaccagtgatgtgaagtatgtgattgccaacaacaacttgtgggccagcccgttggatcaacagttgcgcaacaccctggttgccaacctgagtacgcaactgcccggctgggtggttgcctcccagcctctgggaagcgcccaggacacgctcaatgttaccgtaacggagtttaacggtcgctatgatggcaaggtcattgtcagtggtgagtggctgttgaaccaccagggacaactgatcaaacgtccgttccgtctggaaggagtgcaaactcaggatggttacgatgagatggttaaagtgctggccggtgtctggagtcaggaagccgcttctattgcacaagagataaagcgtctaccttaattataaagatttgtaaatataaccgtctccggtatgttgcctgaggcggtttttttgtctctaacgtgcggaaaaatttgttcctcttcacattttttgtacaaccgacatgcccgtgtagctcacaaatatgacagtggcgtgaattttgcgcattgacggcagttatgattcgcggtattgcttaactgtgattgcacatttagtaatcactgttttcttttccaccagaaaccagtatgagggaaacgaggcatgaagagacaaaaacgagatcgcctggaacgggcacatcaacgtggttatcaggccggcatcgccggacgcagtaaagaaatgtgtccctatcagacgctgaatcaaaggagtcaatggctgggaggctggcgagaagccatggcggacagggtagtaatggcctgattctgtctctttaaaaagaaacctccgcattgcggaggtttcgccttttgatactctgtctgattataatcagaaggcagacgtatcctggaacagaccgactttcaggtcgctggcggtatagatcagacgaccatcaaccagcacttcgccatccgccaggcccataatcagacgacggttaacaatgcgtttaaagtgaatacggtaggtcacttttttcgctgtcggcagtacctgaccagtgaatttcacttcgccaacgcccagcgcgcggcctttaccttcgccgcccagccagccgaggtagaaccctaccagctgccacattgcgtccaggcccaggcatcccggcataaccggatcgccaataaagtggcatccgaagaaccacagatccggattgatatccagttctgcttcaacataccctttgtcgaagttaccacccgtttcggtcattttgaccacacggtccatcatcagcatgttcggtgctggcaattgcgggcctttagcgccaaacagttcaccgcgaccagaggcaagaaggtcttcttttgtataggattcgcgtttatctaccatgttctctgtaagccttattttattgaagcacgcaggatagctaacacgtgtacgctgaacaagtccgatcagttcggaataaaccagttcagccaacgtaatggccatggaaaacggtgacgtccttcctgttggcttgcttgcgcgatacgttcctggatggtttgcatcagcgtcgtttggccttcgccatcccacaccagatttaataataacggcagtgcgtcagtcacatcgtctactgcccagatggtgaatttgccttcttctaccgctttcaccagttcactgtgaagacttaaatggcgaacgttagctgtggggataatgacaccttgtttcccggttaactcacgttgctggcaaatagcaaagaagccttcgattttctcatttaaaccaccgaccggctgggcgcgaccgaactgatcgacactacctgtgatagcgatactctgattcaccggcacatcggcgagggcgcttatcagggcgcagagttcagccatgctggcactatctccatcaacttcactgtaactctgctcaaatgtcaggcttgcactgaaggggatctgttgctcaagctgtagttcgctcatcaggaacgcttgcatgatcatcatccctttcgcatggatattgccgccaagctccgctttgcgttcgatgtcggtgaattcaccatcgccaatatgcacaacgcagctaatgcgagaaggttcgccaaaagcgcgtggatgacccggaaattcaatgacgctaagggcgttaatttgcccgatgcgttcgccttcggtttcaatcaggatttgctcctgaaggatctcatcctgcatacgttcagcgaggaaaccttcgcgccattcacgctgctgcagcattaagtttagctgctcgccggagaaggtgtcgccatcacacagggaggcgacctctttacactggcggaggatccactgcgggctaagcggaagtgtttcttgttcaccggtgtagcgtgctgcttcgcggataagtatcggccaggcatccgctcccggtgcaggtaagtgattatgtctggcggtaaatgtcacccagcgacaccactgggttacactctccgcatcgacaatctgcagagtatcttcaaattcgctataaatagcctgctcactaagctctggctccatctcctggaaatcagccaaactttcgcgttcgcctaccagaatgactttcagcttcaatggcatgctaggcacagagacggggagagggcggctctcatcaaacgcaacccagtcaaaacgctcgcggttaacgatatttttcagccgcatccacagcagaggttgcgccagcagtgtacgcaaagagataatgagaataccgccatttgcctgatgcaccagaccaggctgcagggtaatgtcgccattaaactggcgcaggcagccaaagagttgctccgcttctacccagtcggcagcgacaacttgcgttaaagtcgcaaaattatcatctgcactcactgcgtgacgtaagcggatggagtggccggaaacctcatagtgaccgcccaccagttggcctgcatcgctttgtagcgtacgcgcggcattggcaataagattcagatactcagactcttccggggccttcgccagcataaaagaggaggatgctcgcgtatgcagcaactgctccagcgcaaattgcagccgcggttgagtatcactgaataaaggatcgttttcgtcaatcaaatgtggctgagcaaatatttcctgatagctatcggtatcaggaaccaggtcacgccatgcaagtttcgtaatggtcaaagttgatgttttttagtctgttgtcaaagccgcgattataccgtaaccggcactacagcacacgtagaaagcaccgacaatactcctggcatgggcgttaaagctcacaggatggagattcttttcttcactggcctaaaaagctgatattctgtaaagagttacacggtaacattgagatcgctatgaaatatcaacaacttgaaaatcttgaaagcggttggaaatggaagtatctggttaagaagcatcgcgaaggggagttaatcacccgttacatagaagccagtgccgcccaggaagccgtcgatgtgttgctcagcctggaaaatgaacccgtgctggtaaatggctggattgacaagcatatgaatccggaactggtcaatcgcatgaagcaaaccattcgggcaagacgaaagcgccattttaatgcggaacaccagcatacgcgcaaaaaaagcatcgatctggaatttattgtctggcaacgtctggctggtcttgcgcagcgtcgcggtaaaacgctttctgaaacgattgttcagctgattgaagatgcggaaaacaaagagaaatacgcgaataaaatgtcttctctgaagcaggatctgcaggcattgctgggtaaggaataactgacgaaagtcagttcaatttactaaaggcaaaaaaaaccccgcagcagcggggtttttctaccagacgagaacttaagcctgcggctgagttacaacgtctttgatacctttaacttcgatctctacgcgacgatccggagccaggcagtcgatcagtgcagcacgctgtttcacgttgtcacaggtgttgccagtaaccgggttggattcgcccataccacgtgcggagatcttgtctgccgggatacctttggagatcaggtaatcaacaacagactgagcacggcgctcggacagaccctggttgtaagcgtcagaaccgatgcggtcggtgtaacccagaacaactacggaaccgtctttcggatccaggttgctcagctggctgtacagctgatccagagcagcctgaccttccggtttcagggttgctttgttgaagttgaacagaacgtcagacttcagagtgaagtgcttggtctgtacttccggtgccggagctggagccggagcaactactggagctgcttcgccctgaccgaaacggtaggaaacacccaggctcagcatgccgttgtccggacgagtgccgatggtgtgtgcgtcaccgatgttgttggtccactggtattccagacgggtagcgatttcaggagtgatcgcgtactcaacaccgccagcgaagaccggagaaacgccggtgtcgtggtttttaccataaacgttggatttagtgtctgcacgccataccatgccacccagacgagtgtagatgtccaggtcgtcagtgattgggtaacccagtttagcggtcagttgaacgccctgagctttgtatgcaccgttttcaacgctgcctttgtacggcatacgacctaaccagtcgtaacccatttcaaagccaacatacgggttaacctggtaaccaccaaaagcaccagcgcccagttggttttcatgggtcgggccattgttgttgatgaaaccagtgtcatggtactgggaccagcccagtttagcaccagtgtaccaggtgttatctttcggagcggcctgcgctacggtagcgaaaccagccagtgccactgcaatcgcgatagctgtctttttcattttttgcgcctcgttatcatccaaaatacgccatgaatatctccaacgagataacacggttaaatccttcaccgggggatctgctcaatattaactctaccgatatcttcggcttatgccgagcacccctggcgatgtaaagtctacaacgtagttgaaaacttacaagtgtgaactccgtcaggcatatgaaaaaaaagtcttgtataaggtatgtttaatcttttttgtcagcgacaatttacagaagagaatcgcggaaaccgcttcagacaagcctccgcaaggaaaattagtcacgactgaaagcattggctgggcgacaaaaaaagttccaggattaatcctaaatttacttaatgatacaaattagagtgaatttttagcccggaaagttgtctcgtggcgtgagaggatgcgcttaccggacgcataataaaccccatagcgttaccttcatttgccgcatcaacaagttcagcatgctcttcttcagtcaaatcatctgccaaccaaccgatcaccacactgtaattgcccgtgcgtaaagcgcgaaccatactctccacagtgtggcaaggggagagctggctaatctgcattactttcgttaagggtagcccagatgcctgaacccattcccgactcagtttttgttgcggtgttaaccagagttgccagcggctttgctgaccgagttgctgtaacaatggcaacagtagaagttgcgtcatcatgggctgatcttcgcgatagacaacttcactgataagcccggctgtagtgttttccgtagagacacgcgcaattttacttgctgcggaactgaagctgctagaacgatgtgcatagccactagtgtacataatcaatccagcccctgtgagttactgtatggatgtacagtacatccagtgacaacaaagatcaaccctattttcggaaagagcctcgcaaattttgtcgttggtgacgggaaaacataaattaatcttgccccttaagaataagttgcctattttcgtagttaacggatccgttaatgtgaatcattcttttatgttatgattttaaaaggaattttatgaaaagcctctcctataagcggatctataaaagtcaagaatacctggcaacgttgggcacaattgaataccgaagtttgtttggcagttacagcctgaccgttgacgacacggtgtttgcgatggtttctgatggtgagttgtatcttcgggcttgtgagcaaagtgcacagtactgtgtaaaacatccgcctgtctggctgacatataaaaagtgtggccgatccgttaccctcaattactatcgggttgatgaaagtctatggcgaaatcaactgaagctggtgcgtctgagcaaatattctctcgatgcagcgctgaaagagaaaagcacgcgcaatacccgggaaagactgaaagatttgcccaatatgtcttttcatctggaagcgattctcggggaggtggggattaaggatgtacgggcgttacgtatacttggggcaaaaatgtgttggttgcgactgcggcagcaaaacagtctggtgacagaaaagattctgtttatgcttgaaggtgccattatcggcattcatgaagctgcgctcccggtggcacgccgccaggagcttgcagaatgggctgactctcttacgccgaaacaggagtttcctgcggaacttgagtaattacgcgctaacaggagtttcctgcggaacttgagtaatctggcgttgcagacgaccaatctcaggcagtaatgcaatcaataatccaacttgttgtacgaccagaggttctttgctgtctgcccgtggttcaagttgctgcatccgctgtttcaggctagctaatgcctcattgacgcgttcttcatcagcaggttgatgatgtaacgcgtcatcaacatagcaaactgcgtcatcaagaaacgccagaatttcaggattagttaactgctcccggtgagcaccgagggcactgatatagctggtaaacgtatggttaaggcacagcaaccgaaacgcggcttcgcgaatttgcggggtaacgttcggctcgctggacatattacttaccacgctcgccagctcagcatcacggttgtgtgcatcgcggcgggcaatacgatacgccagacggttatcacgcccctgatggtattgctccagtatggcatcgagataccgacagttggcctctgtggcgcgttcgagcatgcgcggcagattgcgaaactgccagtcaggccagatgtagctcactgccgcccacgcaatggcacaaccaatcagcgtatcgattacgcgaggtaacgctacttcaaaaccttcacccagtaagttaaaacacagtagcaccaaaagtgtgatgaacatcgttgcatgagcgtattgcacgttacggaaggcaaaaaagagcacgccggtaataaccagcagcaccagctgcccttccagacttggcacaaaccacagcacaggaatgccaatggcgatacctaccagcgtaccaataatccttaacttcaggcggtggcgcgtggcgttatagtttggctggcagacaaacaaacttgtcagcaagatccaatacccgtgatgcattccggttatctgaatgatggcgtagccgaagcacaacaccaggctcattcttaccgcatgacggaagagggcggattccggcgtgaagtgacggctaagacgcagccagatatcactcaacccgtgcgggctgtcatcagcgagctcattttcgtcattattatggggtagtgcctgggcctgttcactttcaattgttgccagttgggcatcaatggcgcgtaaattgttcagcaaaaatcccagtgttttgagtaaatcggcgggtgcgccgttatcgcgcatccgctccagcgcagcatcaatatgcgtaaaagcgcgctcaaaatgcggatcatgttgataaggctgacgcaacaaaatacagcgactcagttgctggcacgcctggccctgcatgctcatcagccgctgaaaacggaacagcacgtcgctgtggcgaaaatgttcacgcaatgtttgatactgaatatgagaagagctggcacgctcgtgaatatcctgtgcgacaaagtaataatgcagcgtgcgacgcgttccccgttgaccacgatcgccacgtaagcgggtcagcaggctgagtttcgtctgattcaatgtcgccatcagcagaccgttggcgagagccaaatcgtacagcggtgcctggctttgatcttcaatatcaggatcaaacatgcggctcttgagctcaagataacgcgccagttgttcatagcaacgcgccaggttgtcctgcagcgggcggaccgggaacagcagatgaccaataagtgtcaggacgttgtaccagacggcaccggccagcagatacatcggctgctgataccagtgctcatacagacttgttcccaacatagtgtaaatggcgatcagcaatgcaccgaaggcaattgttgcatagcgttgacccagaccgccgagcaaaatgaagccgctggtagagagcgttaagccaatcgcaaatagccagggccagggaaacagcaattctacactggcgctggcgataaaaaagcagaacagcgtaatgatgaggttacgcaaacgtcccgccagtcggtcatcgagatcggtcagcgccgctgccaccatccccagcgttagcggaatcgtcagttttacatcacccagccaccacggaaacgctgtggttccacaaagcgcaataaaaatacgcgcgtaatacagccaggcgctgttccaggtatagcgtttgagcaaaggacttagcataaaggccatattagtggattattcaaaacgacgacgtgcattggcttcacgcgcagcttgcgctgtttctacgcttaccacgcgacgaccaaccggccatagtgcaatagcggcaattttaaagttcgcaatgccgacaggaatgccaatgatactaatacattgtgcgatgcccgttgcaatgtgcatcaggcataaccaccagccaaagaaaatcagccagaaaatattcaataccgtaccgccagtattcagcagcacatttttgccagccgggttcagttcatcgacatgaatagcttcattgccataaggcaccagagacagtttagtgatctcccagcaggatcgtgtcagcggtaaggtaaaaatcagcacaatactgaccagagtcgccaacagccagcccagagtggtggcaaatccgccaagcacaaagttcagaatgttcaaaacggtacgcataaaacctcgctttactgtggttttcagtaatgggcggcaattgtaacgtttttttgggctggagcacgttttctctgacggttacactgataagaaataatttcgtgtggatctacagagtcatggaactgaaagcgacaacgcttggaaaacgtctggcacagcacccttacgatcgggcggtgatcctcaatgccgggattaaagtctccggcgatcgccacgaataccttattcctttcaatcaattactggcgattcactgtaagcgcggtctggtatggggcgagctggaatttgtactgccggacgaaaaagtggtgcgtctgcacggcaccgaatggggcgagacgcagcgtttttaccatcatcttgatgctcactggcggcggtggagtggcgagatgagcgaaattgcgtctggtgttttacgccagcaactggatttgattgccacgcgcactggggaaaataaatggctgacgcgtgagcaaacctctggcgtgcagcaacaaatccgccaggctttgagcgcgttgccgttgccggttaaccgactggaagaattcgataactgccgtgaggcgtggcgtaaatgtcaggcctggttgaaagatattgaaagcgctcggttgcagcataaccaggcgtataccgaagccatgcttaccgagtatgcggattttttccgccaggtcgagtctagtccgctgaatccggcgcaggcccgggcagtcgttaatggcgagcattctctgttagtgctggcaggtgcaggaagcggaaaaacgagcgtgctggtggcccgtgcaggctggttgctggcgcgtggtgaagcgtcccctgagcaaattttattgctggcgtttggtcgcaaagccgctgaagagatggacgagcggattcgcgaacggctacataccgaagacattaccgcacgcacgtttcatgcgctggcgctgcatattattcagcagggcagcaaaaaagttccgatagtcagcaaactggaaaatgataccgctgcccgtcatgaactctttattgctgagtggcgcaagcaatgcagcgaaaagaaagcgcaggcgaagggctggcggcaatggctgacggaagaaatgcagtggagtgtgccagaaggtaacttctgggatgatgaaaaattacagcgtcgccttgcctctcgcctcgatcgctgggtaagtctgatgcggatgcacggtggtgcacaggcagaaatgattgccagtgcacccgaagagattcgcgatctgttcagtaaacgtatcaagttgatggccccgttattaaaagcctggaaaggtgcgctgaaggcagaaaacgctgtcgattttagcggccttattcatcaggcgattgtgattctggagaaaggtcgctttatcagcccgtggaagcatattctggttgatgaatttcaggatatcagcccgcagcgggcagcgttgttagcggcattacgcaagcaaaacagtcagacgacgttgttcgctgttggtgatgactggcaggcgatttaccgattcagcggtgcgcaaatgagcctcaccaccgctttccatgaaaactttggtgaaggcgaacgctgtgatttagacacgacttaccgttttaacagtcgtatcggtgaggtggcaaaccggtttattcagcagaacccaggccagctgaaaaagccgctaaacagcttaaccaatggagacaaaaaagccgtcacgttattggatgagagtcaacttgacgctttgctggataagctctctggttatgccaaaccggaagagcgcattctgatcctggcgcgttaccatcacatgaggcctgccagcctggaaaaagcggcaacacgctggccgaagttgcaaatcgactttatgaccattcatgccagcaaagggcaacaggcggattacgtcatcatcgttggcttgcaggagggaagtgatggttttccggctgcggcgcgggagagcattatggaagaggcgctactgccaccggttgaggatttcccggacgctgaagaacggcggttaatgtacgtggcgctgacccgggcacgccatcgggtatgggcactgtttaacaaagagaatccctctccctttgtggaaatactgaaaaatctggatgtgccggtggcgagaaaaccgtaagaaacaggtggcgtttgccacctgtgcaatattacttcagacggtccgcgagataacgctgataatcggggatcagaatatcgaccgcgtcgttgaaatgcgggctctggattatgaagtctgccgttgccacgttggtggcgaccggaatgttccataccgtcgccagacgcagcaaggctttcacgtcaggatcgtgcggcacggcatttagtggatcccagaagaaaatcaatacatcaattttcccttcactgatcaatgcgccaacctgctggtcaccccccattgggccactcaacatcgcgttgacgttcatgccggtcgcgcgggaaattaagttaccggtagtgcctgttgcatacagtacgtgttgttccagtaacggttgatgccgttccacccagctcatcagcatttgtttgcagtgatcgtgtgccaccagcgcaatatgtttccgcgcaggtaaagtgcgagtcgtcagttccataatgtacatccgtagttaactttcctacagattactgtaagcacttatcgctgcaagataaagaccgaaaaagcctgcgcacaggcacaaaaatctcaggaagatggttgtttttccgcccactgcaggaaagtatttcgcgtttgtgggtcagccagtttaaaccaatacttcagccgttgttctgtgagcacctgagactgcggtggaatagcatccagctcggaaacaccgctaagcagcgtactgtcatctgccatcatcgtggcaaattgcggtagactagcgcgtttcgcggatttgttatagcgttcaacctcgacctcataatcaatcgtttttgccgtactggtaatggcgagaatatccagctttaccggaatcggcgtcgcatcgccatccaacaattcaaggcgcggcgcggcatcaaaatggttagcttcccgctcattctccaggcgaggcaggcgaaaattgacctggttgatgagctgggtattaaaactgaccaccagcggtggggagatatacagccgttcttcactattggaaagatgaatcgtcttctcaacgcgaaacactaactgatgcggtccattatccagttcaatgctgtccgcaccgcgcagcagagagctggaaaccttcttgccgtcgagtaccagaagatcgacatcggtactaagccgcagcgtggtggcaaaaacggataccggcaaacataatgcaatcaaggtggtcacgatgccggttttcataggtagctcctgtcaaaagaccgcccgaataataatgtgtcaaaatttttctttaatcatacttactaacatatagacatatttcccgcttttgctctcattcattcgtattagctgcatggttggcatgtcggctttgtcgtacactttgttaaacagtctggaggaaataatgaaagaaaccgatattgcaggcattttaacgtccactcacaccattgcgctggtgggggcaagcgacaaacccgatcgtcccagctatcgcgtgatgaaatatctactcgaccaggggtatcacgtcattccggttagcccaaaagttgccggcaaaacgctgctgggccagaaggggtatggcacgctggcagacgttccggaaaaagtcgatatggtcgatgttttccgtaatagtgaagcggcgtggggcgtggcacaggaagctattgccattggcgcgaaaactctctggatgcaactgggggtgattaatgagcaagcggcagtactggcacgggatgccgggttaaatgtggtgatggatcgctgcccggctattgagatccctcgcctgggcctggccaaataaaaaatccccggaaggcaaaaaccttccggggatttgttcagggattagttacgcagacgcggggcctggagttgtttgcggatggtctgcgccagctcatccatggatggctgttcaggatgttcatcctgcaattcgctacttagctgggcttcagccaggtaggtatgaaccggtaggccgttatcgtcctccatcactacgtgataccacggagcggcgcgaagctcgtcattcaccgccagctcatcagggctcggttcagagaggctataaaccgggtcgatatccacgaccactccgagataacctaacagggaatggcggacctgctggccgataccgaatttgctggcaatcatagtcacctcccgggaaatctttacctttgatataagggtaaaattccacatttcaagttacatgacgcgacaggcaaaccctttcagatatagcccttccggataggtagcgatcaccggatgatcggctgcctgacggaactgctctataaattgtacatcacgaccggcatcaattgcggcatccgcgatgattttctgaaataaatcgctggtcatcagaccggaacaggagaaagtcaggagaataccgccttcattcagcagctgaatcgccagcatgttgatgtctttataaccacgacacgcgcccatcaactggcttttattctcaacaaacttcggcgggtccatcacgataacgtcaaatttttcaccgcgatcgcgataagtacgcagcaatttaaagacatcatcacggacaaactcagccttgctcagatccagtttgttcagctcaacgttctgccgtgcaatatccagcgcttcctgggaggtatcaacgctgacaacctggctgcaaccgcccatcagtgcgcttacggcgaaaccaccggtataggagaaacagttcagcacacgtttattttcaacgtagcggcgggtagccaggcggctatcacgctggtccaggtagtagcccgttttgtgtccgtgctgaatatccaccagcagtttcattccgtgttcttcaatcggcagcagggcaggtggcaactcgccggtgacggggccctgggtcagctccattccttcttttttacgtaccgcgacgtcgctgcgatcgtaaatgctacattccgggtacagcgtttgcagggcactaattaatgccgcgcgctgatattctgccccagcactcagcagttgcagcaccagaaaattaccgaaacgatcgatagtaatacccggcaggccatcagattctccggcgattaaacgatagctgtcgaggccatctttttgcgccagccagtcacgccatttttgtgcttgttgcaaacggcgggaaaaaaaagcaatgtcgatagactcagacgggtcaaacgtccagacgcgcgcccggatttggctagctgggctataagcgccgcgtgctaaccattttccctgatgatcaacaatatcgatggtttcaccgaggctggctttaccttccatgcgggcaacggccccggaaaagacccacggatggcgacgaagtaatgatttttcgcgccctttggctaacactaaacgtacactcataatttacttttctgtcgatgcaaagaaatgggcgtcattgtccggagttttccatggatttgcaacgcgtccattaaggataaggagagcagcaatgagcaaagtctgcataattgcctgggtttacgggcgagttcagggcgtaggatttcgctacaccacacagtacgaagcgaaaagactgggtttaaccgggtacgccaaaaatcttgacgatggcagcgtggaagtggttgcttgcggtgaagaagggcaggtggaaaaattaatgcagtggttaaagagtggcggcccgcgttctgcgcgtgtagaacgggtgctcagcgagccgcatcatcccagcggggaattaaccgattttcgtatccgttaaatacattttaccggttttggcaggccagcaattttggtggcttgcttagccggacctttcggaaacagtcggtataaatagcggctgttacctttttcttcgccaaatttattcgccatcgcttttaccagcatacgaatcgccggagaagtattgaattccagatagaaatcacgcacaaaacgcaccacttcccagtgttccggactcaggctaatcccttcgttctctgcaatcaccacagccagcggctcactccactggctgctttctttgagatagccttcggtatccgtttctatctctttaccttcgaagatcagcataattattactaccttaatcagactggcggcagtgtaacaaaaaacaaagccccgcataaagcgaggctatgaaagtgttagcgggtgagattaatcgcggctagcgaagcccagaatgctcagcaggctgacgaagatgttgtacaggctaacatacaggctaaccgtggcacgaatatagttcgtctcaccgccatgaatgatgttgctggtttcaaacaagatagcgccagaggagatcagaatgaagaccgcgctgatcgccagatgcagagcaggcagctgcaggaagatattcgcaaccataccaatcagcaccaccacaatacccgccatcagcataccgccgaggaagctcatatctttgcgggtggtcagcacatatgcagagcagcagaagaacactaacgccgttccgcccagtgccatagcgattacgtcacccattccggcagacagataggtgttcagaataggtccgaggatataacccagaaaaccggtaaaggcgaatgcggagataatcccggtcggcttattcgccgttttataggtcaggaacatcaaaccatacatacccaccagcgtcagaatcagacccggagatggcagcatcagcaccgtactggcagttgcggtaatcgcgctaaaggccagcgtcaggctcagcagaaaataggtattacgcagcaccttatgggtgctaagcagacttgtacggtcatgactagaactaacaatacgatccattgagtcactctctatgacagatgtaattaattaagcagcataatgataatgcgtaagggcacccagaagttttacccatctttacgcatttgatctggaacaggtttaacagcggattatcaggtcattaagcaaatataacgccctgagaatttcgacaggcaaaagaaaaaggggttagcatttagctaaccccttatcttatttggcggaagcgcagagattcgaactctggaaccctttcgggtcgccggttttcaagaccggtgccttcaaccgctcggccacacttccggaatgacgcgcactataaacatcccgatgcggcgtgtaaacccctaatttgtttgtttgcctgaaaaacagccaaaagtgcattgatagcgtgaaataacagcagattgatcatttcatcaccatgaattccttctcttttactcgtttagcaaccggctaaacatccccaccgcccggccaaaagaaaaataggtccatttttatcgctaaaagataaatccacacagtttgtattgttttgtgcaaaagtttcactacgctttattaacaatactttctggcgacgtgcgccagtgcagaaggatgagctttcgttttcagcatctcacgtgaagcgatggtttgccttgctacagggacgtcgcttgccgaccataagcgcccggtgtcctgccggtgtcgcaaggaggagagacgtgcgatatgaataacgaggaaacattttaccaggccatgcggcgtcagggcgttacccggcgcagctttctcaaatattgtagtctggctgccacgagcctgggattaggcgcgggaatggcaccaaagattgcctgggcgctggagaacaaaccgcgcattccggtggtatggatccacggtctggaatgcacctgctgtaccgaatcttttatccgctccgctcacccactggcgaaggacgtcatcctttccctgatttccctcgattacgacgatactttgatggctgccgccggaacccaggcggaagaagtctttgaagacatcatcacgcaatacaatggcaaatatatcctcgcagtagaaggtaatccgccgctgggcgagcaggggatgttctgtatcagcagcggtcgaccgtttattgagaaactcaaacgtgccgctgccggagccagcgcgattatcgcctggggaacctgcgcgtcctggggctgcgtgcaggccgcgcgacccaatccgacgcaggcaacgcctatcgacaaagtcatcaccgacaaacccattatcaaagtacctggctgcccgccgatcccggatgtgatgagcgccatcattacttacatggtgacctttgatcgcttgccagatgtcgacagaatgggccgtccgctgatgttctatggtcagcgaatccacgataaatgctatcgccgcgcccacttcgacgccggagagttcgtccagagttgggatgatgacgctgcccgcaaaggttactgcctgtacaaaatgggctgcaaagggcctaccacctataacgcctgttcctccacacgctggaatgatggcgtttctttcccaatccagtctggtcacggctgcctgggctgtgcggaaaatggtttctgggatcgcggtagcttctacagccgcgtggtcgatattccgcaaatgggtactcattccaccgccgataccgtcggtttaaccgcgcttggcgtggtggcagcggctgttggtgtgcacgcagtcgccagcgccgttgaccagcgcagacgtcataaccagcaacctacagaaaccgaacatcagccaggcaatgaggataaacaggcatgagcactcagtacgaaactcagggatacaccatcaataatgccggacgccgcctggtggtcgacccgattacgcgcatcgaaggccacatgcgctgcgaagtgaatattaacgatcagaatgtgatcaccaatgccgtctcctgcggcaccatgtttcgcgggctggagatcatcctacaagggcgcgacccgcgcgatgcgtgggcgttcgttgaacgtatctgcggcgtctgtactggcgtacacgccctggctagcgtttacgccatcgaagatgctatcggtattaaagtgccggacaacgccaatatcatccgcaacattatgctggcaacgctctggtgccacgatcatctggtgcacttctatcagcttgccgggatggactggatcgatgtgttagatgcgctgaaagccgacccgcggaaaacctccgaactggcgcaaagtctctcctcttggccgaaaagttcccctggctatttcttcgacgtacaaaaccgcctgaaaaaatttgttgaaggcgggcagttggggatcttccgcaatggctactgggggcacccgcagtacaaactgccgccagaagctaacctgatgggctttgcccactatctcgaagctctcgatttccagcgtgaaattgtcaaaatccacgcggtctttggcggtaaaaacccgcatccaaactggattgtcggcgggatgccttgcgccatcaacattgacgaaagcggcgcggtcggggcagtcaatatggaacgcctgaacctggtgcagagtattatcacccgcacggcggacttcattaacaacgtgatgatccccgacgccttagccatcggtcagttcaacaaaccgtggagcgaaatcggcactggtctttctgataaatgcgttctcagctacggcgcattcccggatattgccaacgactttggcgagaaaagtctgctgatgcctggcggcgcggtgattaacggcgacttcaacaatgtgctgccagtggatttggttgatccgcagcaggtgcaggagtttgtcgaccacgcctggtatcgatatcccaacgatcaggtcgggcgtcatccgttcgatggcatcaccgacccgtggtacaaccccggcgatgtcaaaggcagcgataccaacattcagcagctgaatgaacaggaacgctacagctggatcaaagcgccacgctggcgcggtaacgcgatggaagtggggccgctggcgcgcacgttaatcgcttatcacaaaggcgatgctgcgaccgttgagagcgtcgatcgcatgatgagcgcgttgaacctgccgctttccggtatccagagtacgttaggccgcattttgtgccgcgcgcacgaagcgcagtgggccgcaggtaagttgcagtatttcttcgacaagctgatgaccaacctgaaaaacggcaatctcgccactgcttccacggaaaaatgggaacctgcaacctggccgacagagtgccgtggtgtcggttttaccgaagcgccgcgcggggcgttaggccactgggccgccattcgcgatggcaagattgatctctaccagtgcgtggtgccgaccacctggaacgccagcccgcgcgatcccaaagggcagattggcgcttatgaagcggcgctgatgaacaccaaaatggcgatccccgagcaaccgctggagatcctgcgtactctgcacagctttgacccgtgcctcgcctgtagtacacacgtgctgggcgacgacggtagcgagctgatctccgtgcaggtgcgttaacagcgaaggagaatcatcatgcaacagaaaagcgacaacgttgtcagccactatgtctttgaagcgccagtgcgcatctggcactggttgacggtgttatgcatggcggtgttgatggtcaccggatactttatcggcaagccgctaccttccgtcagcggcgaggcgacgtatctgttctatatgggctacatcaggttaattcacttcagcgccgggatggtttttaccgtggttttgctgatgcggatctactgggcttttgttggcaatcgatactcccgcgagctgtttatcgtgccggtatggcgtaaaagctggtggcagggcgtgtggtatgaaatccgctggtatctgtttctggcaaaacgtccgagtgccgatataggccataatcccatcgcccaggcggcgatgttcggctatttcctgatgagcgtctttatgatcatcactggttttgcgctgtacagcgaacacagccagtacgctatttttgcgccgttccgttatgtggtggaatttttctactggacgggtggcaacagtatggacattcacagctggcatcggctggggatgtggctgattggcgcgtttgtgatcggtcatgtctacatggcgctgcgtgaagacatcatgtccgacgacacggtgatctccaccatggtcaacggctaccgtagccacaaatttggcaaaataagtaacaaggagcgtagttgagctaaataagtaacaaggagcgttcatgagcgagcaacgcgtggtggtcatggggctgggcaacctgctgtgggccgatgaaggcttcggcgtgcgggtggcggaacggctgtatgcccattaccactggcccgagtatgtggagattgtcgatggcggtactcagggactgaacttgctggggtatgtcgaaagcgccagccatctgttgattctcgatgccattgactacgggctggaacctggaacgctgcgaacctatgccggagaacgcattccggcttatctcagcgcgaagaaaatgagcctgcatcagaacagtttctccgaagtgttggcgctggcggatatccgcggacatctgccagcacatattgccctcgtcggtctgcaacccgcaatgctcgacgactacggcggtagcctgagcgaactggcacgggagcaactgcccgctgcggaacaggcggcgctggcgcagcttgctgcgtggggaattgtgccgcaaccggctaatgaaagccgctgtctcaattatgactgtctgagcatggaaaattacgaaggcgttcgcttgcgccagtaccggatgacacaggaggagcagggatgagcaacgacacgccatttgatgcgttgtggcaacgaatgctggcgcgcggctggacgccagtcagtgaatcccgtcttgacgactggcttacgcaagcgccagacggcgtggtgttattaagcagtgacccgaaacgcacgccagaggtcagcgataatccggtaatgattggcgaattactgcgcgagtttcccgactatacatggcaggtggcgattgctgaccttgagcagagcgaagccatcggcgatcgctttggcgtctttcgctttcctgccactttagtgtttaccggcggaaactatcgcggcgtgctgaatggtattcacccgtgggcggaactgataaacctgatgcgcgggcttgtcgaaccgcagcaggagcgtgccagttgatctaaccgcagcaggagcgtgcctcatgagcgaaacttttttccatctgctggggccaggaacgcaaccgaacgatgacagtttcagcatgaatccactgccgatcacctgtcaggtgaatgatgaaccgagtatggcggccctggagcaatgtgctcacagcccgcaggtgattgcgctgttaaacgagttacaacatcaactaagcgaacgccaaccgccgttgggcgaggtgctggcagtcgatctgttaaatctcaacgccgacgatcgtcactttatcaatacgcttctcggggaaggggaagtgagtgtgcgcattcagcaggctgacgacagtgaaagtgaaatacaggaggcgatcttctgcggattatggcgggtgcgcagacgtcgcggcgaaaagttgctggaggacaaactggaggctggctgcgcgccgctggcgttgtggcaggcggcaacgcaaaatctcttgccgacagatagcctgttaccgccgcccattgatggcctgatgaatggcctaccgttggcgcatgagttactggcacatgtacgtaaccccgacgcgcagccgcacagcattaatctgacgcaattacccatcagcgaggctgatcggctttttctcagtcgtctctgtgggccgggaaatattcagattcgtaccattggctatggcgagagctatatcaacgccacggggttacgccatgtctggcatttacgctgtacggacaccttaaaaggcccgttactggaaagttatgaaatctgcccaataccggaagtggtgctggcagcgccagaagatttggtcgactctgcgcagcggcttagcgaggtatgtcagtggctggcggaagctgcaccgacgtaaaaagacggtaagtatcgctttcagtcttatgaatatcgcaatcggcgaatacctctggtcgtagagtttcaggataaagagggagatctaccattatcgggttatttttctctcttcgcctacaggagtgcgcatgtgggatgtcattgatttaagccgctggcagtttgctctgaccgcgctgtatcactttttatttgtaccccttaccctggggctgatttttttgctggctattatggaaaccatttacgtggtcaccggcaaaacaatctaccgcgatatgacgcgcttctggggtaagctcttcggtatcaattttgctcttggcgtggctaccggcctgaccatggagtttcagtttggtactaactggagtttctattccaactatgtgggcgatatttttggcgcaccgctggcgatggaagcattaatggccttcttcctcgaatccacctttgtcgggctgttcttcttcggctggcaacggctgaataaataccagcacctgctggtgacgtggctggtggcgttcggtagtaatctctctgcgttgtggatattgaatgccaacggttggatgcaatacccgaccggtgcgcattttgatatcgacaccctgcgtatggagatgaccagcttcagcgagctggtctttaatccggtcagccaggtgaaatttgtgcacaccgtaatggcgggctacgtgaccggggccatgtttattatggcgatcagcgcctggtatttactgcgcggacgggagcgcaatgtcgcattacgcagctttgccatcggttccgtcttcggtactctggcgattatcggtaccctgcaactcggagacagttctgcgtatgaagtcgcgcaagtacaaccggtaaaactggcggcgatggaaggggagtggcaaacggaacctgcacctgcaccgttccatgtggttgcctggccggaacaggatcaagagcgtaacgcctttgccctcaaaattcccgcgctgctagggatcctcgccactcacagtttagataaacccgtgccgggtctgaagaatttgatggctgaaacctacccacgcttgcaacgcggacgtatggcctggctgttaatgcaggaaataagccaaggcaatcgtgagccgcatgtgttgcaggcattccggggactggaaggtgacctgggctacggcatgttgctctcccgctatgcgccggatatgaatcatgtcacagccgcacagtaccaggcggcgatgcgtggcgcgatacctcaggttgcgccggtattctggagtttccgcatcatggtgggctgtggttccctgctgctactggtgatgctgattgcgcttgtccagacgctgcgtggcaaaatcgaccagcatcgctgggtgctgaaaatggcgctctggagtttgccgttgccgtggattgcgattgaagccgggtggtttatgaccgagtttggtcgtcagccgtgggcgatacaggacatcttaccgacatactccgcgcactccgctttaaccacaggacaactggctttcagtctgatcatgatcgtagggctttacaccctgttcttaatcgccgaagtctacctgatgcagaaatatgcccgtctggggccgagcgcgatgcagagtgaacaaccgacgcagcaacaggggtaaaggagaaaatcatgtttgattatgaaacattgcgcttcatctggtggctgctgattggcgtgatcctggtggtctttatgatctccgacggatttgacatggggatcggctgtctgctgccgctggtggcgcgtaatgatgatgaacgccggatagtgataaacagcgttggtgcacactgggaaggcaaccaggtctggttgatcctcgctggtggggcattatttgccgcctggcccagagtgtatgcagcggcgttttccggcttttatgtggcgatgatcctggtgctgtgcagtctgttcttccgcccgctggcctttgattatcgcggaaaaatcgccgatgcacgctggcgtaaaatgtgggacgccggtctggtcatcggcagtctggtgccgccggtagtcttcggtatcgccttcggcaacttgttgctcggcgtgccgtttgccttcacaccgcaattacgcgtggagtatctcggcagcttctggcaactgctgacgccattccctttattgtgcggattgctcagccttgggatggtgattttgcaaggtggcgtctggttacaactgaaaactgttggtgtgattcatctgcgtagtcagctggcgaccaaacgcgctgcactgttggtgatgctgtgctttttgctggcgggttactggctgtgggtcggtattgatggctttgtactgctcgcccaggatgctaacggtccttccaatccgttaatgaaactggtggcagtgctacctggtgcctggatgaataattttgtcgagagccccgttttgtggatcttcccgctgctgggattcttctgcccattgctgacggtgatggcgatttatcgtggtcgcccgggttggggatttttgatggcaagtttgatgcaatttggcgtgattttcacggcaggcatcacgctgttcccctttgtcatgccgagtagcgtgagtccgatctccagcctgacgttgtgggacagtacttccagtcagctgacgctgagcattatgttggtaatcgtgctgatatttttgcccattgtgttgctctacactctctggagctactacaaaatgtgggggcgcatgacaacagaaactctccgccgtaacgaaaacgagttgtactaaggagcagaaacaatgtggtatttactttggttcgtcggcattttgttgatgtgttcgctctccacccttgtgttggtatggctggacccgcgtctgaaaagttaacgaacgtaggcctgatgcggcgcattagcatcgcatcaggcaatcaataatgtcagatatgaaaagcggaaacatatcgatgaaagcgatcttaatcccatttttatctcttctgattccgttaaccccgcaatctgcattcgctcagagtgagccggagctgaagctggaaagtgtggtgattgtcagtcgtcatggtgtgcgtgctccaaccaaggccacgcaactgatgcaggatgtcaccccagacgcatggccaacctggccggtaaaactgggttggctgacaccgcgcggtggtgagctaatcgcctatctcggacattaccaacgccagcgtctggtagccgacggattgctggcgaaaaagggctgcccgcagtctggtcaggtcgcgattattgctgatgtcgacgagcgtacccgtaaaacaggcgaagccttcgccgccgggctggcacctgactgtgcaataaccgtacatacccaggcagatacgtccagtcccgatccgttatttaatcctctaaaaactggcgtttgccaactggataacgcgaacgtgactgacgcgatcctcagcagggcaggagggagtattgctgactttaccgggcatcggcaaacggcgtttcgcgaactggaacgggtgcttaattttccgcaaagtaacttgtgccttaaacgtgagaaacaggacgaaagctgtagtttaacgcaggcattaccaagcgaactcaaggtgagcgccgacaatgtcagtttaaccggtgcggtaagcctcgcaagtatgctgacggagatatttctcctgcaacaagcacagggaatgccggagccggggtggggaaggatcaccgatagtcaccagtggaacaccttgctaagtttgcataacgcgcaattttatttgctacaacgcacgccagaggttgcccgcagccgcgccaccccgttattagatttgatcaagacagcgttgacgccccatccaccgcaaaaacaggcgtatggtgtgacattacccactagtgtgctgtttatcgccggacacgatactaatctggcaaatctcggcggcgcactggagctcaactggacgcttcccggtcagccggataacacgccgccaggtggtgaactggtgtttgaacgctggcgtcggctaagcgataacagccagtggattcaggttagcctggtcttccagactttacagcagatgcgtgataaaacgccgctgagtttaaatacgccgcccggagaggtgaaactgaccctggcaggatgtgaagagcgaaatgcgcagggcatgtgtagcttggcaggttttacgcaaatcgtgaatgaagcacgcataccggcgtgcagtttgtaatgcataaaaaagagcattcagttacctgaatgctctgaggctgatgacaaacgaagaactgtctaatgcgtagaccggaaaaggcgttcacgccgcatccggccactttcagtttgcaatacgtacgcttgagatcaggattgtctactttgagtataacatccttgtgaaatctccctttcctcataccgcttgcactatatactgcgggtaggaaaggcgcgcagagggaaatataagattgttaactatccccctctggaaatacgacttgtgagcataagataaatcttagcaaaatacaaattaaagataaggaaattgttacgaaagctattaattattgttggtaatatagtttcaagtggtactataactggctgttaaatggcatttataactattaggtgcagagatattcgcttaaatggattagtttctttgtggaaaagtaactgatgttataatgtatgatgttgactatttcactattccaataaaaccagtcagctttaaacaagcagcgtcatattaagagagataaacatttgccgctgttggtcctcgcaggccatttacgcggcaaaattccacacgtaatcctggtataagcacttctgcgtcgcggggagtgaatgcggaaatatggacctgaacttctttacgaccgtcggaggggataatgaatcctttgccgcttttgcgatcaaaggttttgacaattcctgtcattttacgggacaaacaaattccttactgaaaatactgcgctgcactatacggggttaataaaataaagccagcgatatttaagaccgccggacggctaaaataaaatttgcttaatctcaattatcatgcgttaatagctgcgtcggtttgaaagacagacagcatacaaagtagtttactaaagcagttctcattatcaggcattatccccttcttttgagtctctctcctgaacactaagtagtttctgtattaaagccctgtttgccgaaaggcccaaaatgaaggaagtaaaatatgtctaataaaatgactggtttagtaaaatggtttaacgcagataaaggttttggctttatcactcctgatgatggcagcaaagacgttttcgtccatttcaccgccatccagagcaatgaattccgcacgctgaacgaaaatcagaaagttgaattttctattgagcaggggcaacgtggccccgcggcagcgaacgttgttacgctctaaggttgccattattactcaacatctccatttccgctgtccatgttgtcatggttcacagtaccgcacatcggcattcgatgtgacggagcgaaaccctttgggcgctaagtgtattttttgtaaatcgacgatgatcacctttgataacgtcgcgctgcaaatacgcactgaccatgcgccgctggattagtcaaaataatatcaggctccctcgtggagccttttttatatctgccttatttttcttcaacgctgtatgtatagtaagcgataacctgttgattattgaatctttcggggagatggcttataacatttcttacctgaccagggtaccgggaaccaacaccttactggcgtgttgctgtcttttaagaccagaagaggttaacagtgaatattgaagagttaaaaaaacaagccgaaacggaaatcgccgactttatcgcgcaaaaaatcgccgagctgaacaagaatacagggaaagaagtctctgaaattcgcttcaccgcacgagaaaaaatgaccgggcttgaaagttatgatgtcaaaatcaaaataatgtgattttgtgaacatcaccccgtgcgaggtgatgttccgcttgttgctaatttagtgaccaatcattggcgcttgtggaattaagcgtcggtacaattcctccggcaccgggctttgccatactcccgcatacattgcgtaaccaatcaccgcaaacataatccccagaaccagtagcgtcattaaccagccagacaacgcaaaggcttttttatttgccgcaggtttttgcagactaaaggtcaatgtactggctaccggacaactctctacgcaagtcatacagccggtacattccactgttcgtacctgaattaatttatcgaccgggatccgacttgggcaattttttgcgcatttgccacagtcgatacaactttcggcattgcgacgaatcttaaacgggctcaataggctaaccacgcccatcagcgcgccatatgggcaaagataacgacaccaggcatggcgaataaacaggctggcaatcagcaaaacggtcacgctgattaatgtcgcggtccccatatgacgaaagaaatcgagcattttaacgtccatcaccacgctgtaggggctcaacataaaatagtgaatcgcctgagcgggcatcaataacgcgatatagataaaaaaactcaacagcaaatacttcacgccgcgcagaggaatatccagccagcggggaaggacacattgccgaccaaacagtttgttaccgagatcgccgattaattcagaaagcgtaccaaccgggcataaccaactgcaaaaggcctttttgagtaatagactgatgacgataaaagcgaccaataacagcatcgcggcggcgtggacggacggtaactgacctgttacaaggctatatttcagattcatcagcccggcaatcggtagccagccttcgatacctcccggtctggcgacaaatgtcgtgctacttgccgtttcgtaatagcgcacccaataccagaacgtgatggcaatataaatattcattgccaacagtaataattgcgtcgctttacgccaggtcgtggcattacgccagtcattccacggtaatttgccgcccgtcgtgcctggccgccgctgccagcgggttcttttattctctgccatgattttgccagtccgttaagttgtataccaaatgccactattctagttgttcttaactggctgatattgattcaaatcgcgttcaggtctttcttatgcaaccatgcttccagagcggcaacactgcgtgtaatttcttcgtgtggaaggggggcagataatggctgctgctccagttgtgcgcatagctggctggcgatatgcattcccagactgctgcaactgctttttagctgatgcgcggcacgctttattttctcgctatcctgactggcgcgggcaatgtcgatttcatcgagaagcggcagggcatgttgtgtaaataataccagccattcgtggatcttctccgtccccattaactgagcatcttcattgagttggcttacatccaggctttgatcattattgacttgcagttggagatagtgcgccagtaactgaccgagcacttcacgcggcaccggtttagggataatcccgcggaataaactactggtacgctggcgcagcgtttcgtcaatgacatgggcgctaaagccaatcaaaaccaggctcggatattgctgtgccagttgtcgggcaagcgtaatgccgtcgatatccggcagatcaaaatccaccagtgcggcagcaaacggttcgctattttgcagtgtctctaaagcctgcgcggcattgccaacagcaacaatctgcgcaccactggttttcagcatctcaatggtaattcgctgggttagcgggttatcttcaattaacagcaaacgtaaaccgtcaagacgcaccgcctgattgactgtttttggcacgggtgccgtggcaacacgtaacggcaagcgtaaacaaaaacagcttccaacctccggcgtgctggtggcgctcagttcgccgcccatcgcctgggccagacggctactgatagtcagtcccagcccggtgccgccgcgtttgccgcttacctgcacaaatggctggaagatttctgccagtttcgcgggatcaataccgcagccgctgtcttccacttcgaccagccattgctcgccatcagtgcgactacgcaggataatgtacccttcgtcagtaaaacgcagggcgttgctcaacaggttggttataacctgacgaatacgtcgtggatcgcccattaacgcgcacggcatatcatcggcaattgccgttgccaggcgaatcgggcgacctttcacccgtccgctcattaattgcagggtactttccagcagcgggcgcggttcaaagggctcatcgctgacgctaacattcttgccacctgcttcgatagcggaataatcgagaatatcgttgaggatggtcagcaagctttcaccagagtcagtaattgcccgcaaatcatcacgctgggcgttaagtgcggggttatctgccagcagttgagcagtgccgagaataccgtacagcggtgtgcggatctcatggctcatcgccgccagaaacgcgctttttgcctggctggctttttctgcttccgcccgtgcctgtcggtgttctatcaccagttcctgcaattcagctgtacgcgctttgacctgcgccgccagctgttcgcggtggcgattcagtgcatgaacattgctgcgaaacgcatccatcagccgcccgatggtatccagctcccgtacgccagcggtttccgggaaaggggagtcaatatcaccgtccagcagccgttgcagcgcctgcgtttgttcggcaagtggacgcgtgacactgcgataaaccacgcgccagaggatcagaatcagtgcgcaaagactaaccatccccagcaataacaggctgtattgcccgcgtgcactcgctttttccagatgcgccagtccgtgctgattacgcagctcaatggtgtcgaccagctgactgacttcgctactaaactgcgcgaactgggcgatgttattttgtgcgagagtttgtaggtgattgctgatttcactgtcctgctgatacagcgccagcaaatcgctatattggctaacggtagttaacgttgttgcgacctgcgcacgaacacccggatcttcaatgcgtatttgccgacgttgcagaattttcaccgcattattgagctgcttttccagcgttggtgcatttttctggatctgctccagccccagattcatcaccatttgctgcacccgcagagcgctaaggcgcagttcattcatctggttaacatactcaagatcgatatcaatcagccgatcgagtgcactttcagcagcctgacgctgatcttgttcgatcaaatcgtaaatcccggcctgggtcgctccagcggaagttgtcgcattattcgcctgaccttgcgccaggcgtgcgatctcatcggcggcagcgactatctgctgactgagttgctgttgttgctggcgcagttgcaaacgctgccccaccagttccccttgctgacgtaagctacgggagatctcctgctcctgttgttcaatagcggtggtatcaaaaccttgttcccgtaacgcttgcagcaacgcattaatcttcaggctttgtgcggtgagcattcgcccctgcgcctgccacatcttttcgttatcggcactggtcaggttctgcgcggcgaaaagttcccaggcgctggcttcgctcaactggcgcgccatattcatggtaggaatcaatgcctgagtgttgtctttttccacctggctgataaagcgcaggttgtaccatcccaccagggtactggtcagggttaacagcgccatcagggcaaagcccatccagagtcttcgggtcagggttaaattcacggtcggtgcactttaggtgaaaaaggttgagtcgcaaagcggaatgcatctagcataaagccttattattgatgaggctatcatgcgcgtactgctatttttacttctttcccttttcatgttgccggcatttagcgctgataacctgttgcgctggcatgatgcgcagcatttcacggtgcaagcctctacgccgcttaaagccaaacgcgcatggaaactgtgcgcgctttatcccagcctgaaagatagttattggttaagcttgaactatggtatgcaggaggctgctcgccgctacggtgtggatttaaaagtgctggaggcaggcggctacagccagttggctacccagcaagcacaaatcgaccagtgtaaacagtggggcgcagaggccattttgctcggtagtagcacgaccagttttcccgacctgcaaaagcaggtagcaagtctgccggtgatcgaactggtaaatgctattgatgctccccaggtgaaaagccgcgttggtgtgccctggtttcagatgggctatcaaccggggcgatatctggtgcaatgggcgcacggtaaaccactgaatgtgctgttgatgcccggacccgataacgccgggggcagtaaggagatggtcgagggttttcgcgcagccattgccggaagcccggtgcgtattgttgatattgcgcttggtgataacgatattgaaatccagcgtaacctgttgcaggagatgctggaacgccatccagaaatcgacgtcgttgccggaacggccattgcggcagaggcggcaatgggggaagggcgtaacctgaaaacgccgcttaccgtggtgagcttttatcttagtcatcaggtgtatcgcgggctgaagcggggaagagtgattatggctgccagcgatcaaatggtctggcagggggaactggcggttgagcaggccatcaggcaattacaggggcaaagcgtttctgataatgtcagcccaccgattttagttctgacgccgaaaaatgccgaccgtgaacatattcgccgcagcctgagtccagggggatttcgtccggtctatttttatcagcacacaagtgcggctaagaaataatcagcacacatcagcggctaagaaataaccttcaccatgttgcgtcaccagtaaatccgcgctgagtttatgacgtaaacgacgaattaacacatcgacggtgcgcaggtcagggttttccacccgacgcgcagaaagcatacgtagcagacgttcacggctgagaatttcgcccggattcgtcacaaatgccaccaacatttcatactctgcgcgggtcagtttaatcggctcgccatcccgctccagcgtatggcggctcacattcaggcaataaccggcaaagcgatagcagttgtcctgagtgtgcggttgagcttgtcgcgcgaggtcgattcgccagagcagatttttcacccgtactaccagttcgcgcagttccagcggtttggtgacgtaatcgtctgcgcccatttccagcccaacaatacggtcaatccgatcgctgcgtccggtaaccagaataatccccaccgtactgcgttctcgcagggcgcgggttaacatcaggccattttcatcgggtaagttgatatccagcagaattaaatctacgctctgattctgcataatttcccgtagcccagcaccgctcgccgtaacggaaacggtatacccctcctgagtgaagtaggattgtaatcgcgcctgggtaaccggctcatcttcaacaataacaatgtgatgtggcatcagagggttttactcattctgttcatatctgttcatattctgccgtaagccgttcatcctgaccagtgccgctgttcatatttgctcattaagatcgcttcactaaaccataattctacaggggttattatgcggaaactctggaacgcgctacgccgacccagtgctcgttggagcgtactggcgctggtcgcaattgggattgtgattggcattgcgctgattgtattgccacacgttgggatcaaagtcaccagcacaaccgaattttgtgtcagttgccacagtatgcaaccggtgtatgaagaatataaacagagcgtgcatttccagaacgcctccggcgtgcgagctgaatgccatgactgtcatatcccgccggatattccaggcatggtgaagcgcaaactggaagcgagcaatgatatctaccagacctttattgctcactccattgatacacctgaaaaattcgaagccaaacgcgcggaacttgccgagcgtgaatgggcgcgaatgaaagaaaacaacagcgcaacctgccgctcctgccataactacgatgcgatggatcatgcgaagcagcatcctgaagcagcacgtcagatgaaggtggcagcgaaagataatcaatcctgcatcgactgtcataaaggtattgcccaccagttaccggatatgagtagcggcttccgtaagcagttcgatgagctgcgcgccagtgctaatgacagtggtgacacgctgtactctattgatattaagccaatttatgcggcgaaaggcgataaagaagcctctggttctctgctgcctgctagcgaagtgaaagtccttaaacgtgacggcgactggctgcaaattgaaattaccggctggacggaaagcgccggacgtcagcgtgtactcacccaattcccaggtaaacgcatctttgttgccagcattcgtggtgatgtgcagcagcaggtaaaaacgctggagaaaaccaccgttgccgacaccaataccgagtggagcaagttgcaggccactgcgtggatgaagaaaggcgacatggtgaacgatatcaaaccgatctgggcttatgcggatagcttgtacaacggcacctgtaaccagtgccacggcgcaccggaaatcgcccactttgacgctaacggttggatcggcacgctcaacggcatgattggctttaccagtctcgataaacgtgaagaacgcaccttgttgaaatatctgcaaatgaatgcgtctgacaccgcaggtaaggctcacggcgataagaaggaagaaaaataatgaacaataacgatctctttcaggcaagtcgtcggcgttttctggcacaactcggcggcttaaccgtcgccgggatgctggggccgagtttgttaacgccgcgacgtgcgactgcggcgcaagcggcgactgacgctgtcatcagcaaagagggcattcttaccgggagccactggggggctatccgcgcgacggtgaaggatggtcgctttgtggcggcaaaaccgttcgaactggataaatatccgagcaaaatgattgccggattgccggatcacgtacacaacgcggcgcgtattcgttatccgatggtacgcgtggactggctgcgtaagcgccatctcagcgatacctcccagcgcggtgataaccgttttgtgcgcgtgagctgggatgaagccctcgacatgttctatgaagaactggaacgcgtgcagaaaactcacgggccgagtgccttgctgaccgccagtggttggcaaagcacggggatgttccataacgctagcgggatgctggcgaaagctattgccttgcatggtaatagcgttggtacgggcggagattactctaccggtgctgcgcaggtgatcctgccgcgcgtagtcggtagcatggaagtgtatgaacagcaaacctcctggccgctggtattgcagaacagcaaaaccattgtgctgtggggctccgatttgctgaaaaaccagcaagcgaactggtggtgcccggatcacgatgtttatgaatattacgcgcagctaaaagcgaaagtcgccgccggtgaaattgaggtcatcagcatcgatccggttgtcacatccacccatgagtatctggggcgcgagcatgtgaagcacattgcggttaacccgcaaactgacgtgccgctgcaactggcgctggcacatacgctgtacagtgaaaacctgtacgacaaaaacttccttgctaactactgtgtgggttttgagcagttcctgccgtatctgctgggtgagaaagacggtcagccgaaagatgccgcatgggctgaaaaactgaccggcattgatgccgaaaccattcgtgggctggcgcggcagatggcggcgaacagaacgcaaattattgctggctggtgcgtgcagcgtatgcagcacggtgaacagtgggcgtggatgattgtggttctggcggcgatgctggggcaaattggcctgccaggtggtggttttggttttggctggcactacaacggcgcaggcacgccggggcgtaaaggcgttattctgagtggtttctccggctctacgagcattccgcctgttcacgacaacagtgactacaaaggctacagcagcactattccgattgcccgttttatcgatgcgatcctcgaaccggggaaagtgatcaactggaacggtaaaagcgtaaaactgccgccgctgaaaatgtgtatttttgccggaactaacccattccatcgccatcagcagatcaaccgcattattgaaggcttgcgcaagctggaaacggttatcgccatagataaccagtggaccagtacctgccgctttgccgatatcgtactgcctgcgaccacgcagtttgagcgtaacgatctcgaccagtacggcaatcactccaaccgtggcattatcgccatgaaacaggtggtgccgccgcagttcgaggcgcgcaacgacttcgatattttccgcgagctgtgccgtcgctttaatcgcgaagaagcctttaccgaagggctggacgaaatgggctggctgaaacgcatctggcaggaaggtgtacagcaaggcaaaggacgcggcgttcatctgccagcgtttgatgacttctggaataacaaagagtacgtcgagtttgaccatccgcagatgtttgttcgccaccaggcattccgcgaagatccggatctcgaaccgctgggcacgccgagtggcctgattgagatctacagcaaaactatcgccgatatgaactacgacgattgtcaggggcatccgatgtggtttgagaaaatcgaacgctcccacggtgggcctggcagccaaaagtatccgttgcatctgcaatctgtgcatccggatttccgacttcacagccagttatgtgagagcgaaacgctgcgtcagcaatatacggtagcgggtaaagagccagtattcattaacccgcaggatgccagcgcgcgcggtattcgtaacggtgatgtggtacgcgtctttaacgctcgcggtcaggtgttggcaggggcagtggtttctgaccgctatgcacccggcgtggcacgaattcacgaaggggcatggtacgatccagataaaggcggcgagcctggtgcgctgtgcaaatacggtaaccccaacgtgttgaccatcgacatcggtacaagccagctggcgcaggcgaccagtgcgcacactacgctggtggaaattgagaagtacaacggaacagtggagcaggtgacggcgtttaacggccccgtggagatggtggcgcagtgcgaatatgttcccgcgagccaggtgaaaagttgaattaacccgcgtcgcaggtgaaatcatgaccacgctgacagcacaacagattgcctgtgtttacgcctggctagcgcagttgttctcccgtgagctggacgatgaacaactgacgcaaatcgccagtgcgcagatggctgaatggtttagcttgctgaaaagcgaaccgccgctcactgcggcggtgaacgagctggaaaaccgtattgccacgctgacagtacgtgacgatgcccgtctggaactggccgcggacttttgcggcctgtttctgatgaccgacaaacaagcggcgctgccgtatgcaagcgcctacaaacaggacgagcaagagattaaacgcttgttagttgaggcagggatggaaaccagcggcaatttcaacgaaccggcagatcatctggcgatctatctcgaattgctcagccatctgcattttagcctgggagaggggaccgttcctgcgcgaagaatcgacagtttgcggcaaaaaacactgacggcgctgtggcaatggttaccagagtttgttgcgcgttgtcgtcagtatgacagctttggtttttacgcggcactaagccagttattgctggtgttagtggagtgcgaccaccaaaacagataacgtcgtttgtgcgcctgaaaagacgcgtttagcgtcgcatcaggcattatggcgcagttgccggatgcggcgtgaacgtcttatccggcccacaggaactgtaatctttgtagaccggttaagatgcgtcatcgcatccggcaaacacacatcacggatgagctacaaaccgggaaagccgctggcgcagcaggcggttttcctgcttcaggtgcgcaatatcatccattaacgtcagcgccaccgcgatccccggccagtccagagccagttcatgacgcaggcgtaccgcgcgttgcaccacaatggcggcatggtcgtcaaatacccaggttgtttcctggatctcacgcggttcaaccacccccaaaccgacaatttcattcaactcctcttcagagatgccggtatgcaggcaaaattcggtaatagtaaaagtcaccgtaacattagccattatgctttcccccaatctttacgtggatcaaaagagctctgggcgtctgccagttgctgccacagcgcggcagtgttttcatccggtttcggcggcatcacgattttcagtaccgcatacagatcgccggtctgttttttgctcaccagacctttgcctttaacgcgcaatcgttgcccggcctggctgcctggcgggatagtcagcaaaatgctttctttcagtgttggaacggtgactttagcacccagcgccgcttcccacgggctaaccggcaccacaatttccagatcctggccgacaatatcaaacagcggatgtggcgcaatatgaatcaccagccacaaatcgccatttggaccgccgttttcgcccggcgtcccctggcctttcagacggatgcgttgaccattgccgacgcccgccgggatcttcacattcagcgttttcggaatttcctgttcgatcatgccaaaggcgttataaaccggcaggttatagctgatggtacgcttatgctcagtaagcgtttcttcgaggaataccgccacttcgatttcaatatcgtggccgcgtgtggcggggcgttgacggctctggcgggcatgctgaccgaaaatactgctgaagatatcgtcaaaatcttcggcgttaaaactctgaccgtcgccatggtggaactgacggttaaattgcggatcgttgcgatgttgccacatctgatcatactcagcgcgacgttgttcatcacttaacacttcccaggcttcagcgacctctttgaagcgggcttcggcatccggttctttgctgacatcaggatggtatttgcgggcaagtcgacgataggcggtcttgattgtcttgagatcgtccgtcggtttcacgcccatgatggcgtaataatcctttaattccatagcgttatctcgcgtaaatcaacacaaattgaaggaacccctgtaaggtaactcctataagtgtagggtaatcctcaaaatttcatatgccaacacagaatatgttattgaaatcatcgcggagaggaggtcgccatcaagatgggttgctgaacatattttaaacaggtgaaaaagggtgagcgatttttgatagttgaaccaggcactttaagtttaactagggcgtcattatttattaaattttatagacgctatatatgggtagtaatatacatggaattagttgcactgcaaataattatttgaaacaggcctggaacgatataaaaaatgagtacgaaaaaaatcaaacatatagtatcacgctttttgaaaacacactggtgtgttttatgcggttatacaatgaactcagacgtaaagtaaatgaagaggatactccatgtctggaatgtgaaagtctagaaaaagaatttgaggaaatgcagaatgataatgatctaagtttatttatgagaatattgcgtactaatgatacacaaatttatagtggggttagtggaggtattacatatactatacaatatgttcgagatattgatattgttagagtgtccttgccgggcagagctagtgagtctatcacagattttaaaggttattattggtataactttatggagtatattgaaaacattaatgcgtgtgatgatgttttttctgagtattgttttgatgatgaaaatataagtgtccagccagagcggataaatacgccgggaatatctgatttggattctgacattgatttgtctggtatatcttttattcagcgtgaaactaaccaggcattaggattaaaatatgctcctgtagatggcgatggatattgtctgttaagagctatactggttttaaaacaacatgattatagttgggcgctggtcagttataagatgcaaaaggaagtttacaacgaattcattaaaatggttgataaaaaaacgatcgaggctcttgttgatacggcattctataatctcagggaagatgtaaagacgttatttggcgttgatctacaatctgacaaccaaattcaggggcagagtagtcttatgagttggagctttctgttttttaaaaaacaattcattgatagttgcttgaataacgaaaaatgtatcctgcatttacccgagtttatatttaatgataacaagaacttgcttgctttagataccgacacgagcgataggattaaagcggtgaagaattttcttgttgttcttagtgatagcatttgcagtttatttattgttaatagtaatgtggcaagtatctccttggggaatgaatcctttagtacagatgaagatcttgagtatggttatttaatgaacactggcaatcattatgacgtttacctccctcctgaactttttgctcaggcttacaagttaaacaataaggaaatgaatgcgcaactcgactatttaaatcgttatgcaatttaatggcaaaggcatatgctaaaaaccattgttattagtctcacacttttttattggtaaatattgtctctgtattggtaacgccgcagatattctgtttagccacaggtgcaattatcagcggcgtacgcgaggcaggggctaatcaggcatagtttgcgtcaaaccttgcctgtttttgaagatgtatatagaaaaacaggcgttcaacaagccattttgcgaacctgttcccggaaaaaagtcatatttctgtcacactctttagtgattgataacaaaagaggtgccaggaatgaacaaaacgctaatcgccgcagctgtggcagggatagttttactcgctagtaacgctcaggcacaaaccgtaccggaaggctatcagctacagcaagtgctcatgatgagccgccataacttacgtgcgccgctggcgaacaatggcagtgtgctggagcagagcacgccgaataaatggccagaatgggacgtccccggtgggcaactcaccaccaaaggtggcgtgctcgaagtgtatatgggccattacatgcgtgaatggctggcagagcaggggatggtgaaaagcggggaatgcccgccgccgtacaccgtttatgcctatgccaatagtctgcaacgtaccgttgcgaccgcacagttctttattaccggcgcattcccggggtgtgatattcctgtgcatcaccaggaaaaaatgggcactatggacccaacctttaacccggtgatcaccgatgattccgccgcattcagtgaacaggcggtggcggcaatggagaaagagctcagcaaactccagcttaccgacagctaccagctactggaaaaaatcgttaactataaagattcccctgcctgtaaagagaaacaacagtgtagcctggtggatggcaaaaatacctttagcgccaagtatcaacaagaaccaggtgtttccgggccgctgaaagtcggcaacagcctggtagatgcgtttactttgcaatattacgaaggttttccgatggatcaggtggcctggggagaaatcaaatctgaccagcagtggaaggtgttgagcaagcttaaaaacggctaccaggacagcctgtttaccagtccggaagtggcgcgcaatgttgcgaaaccgctggtcagttatatcgacaaagctctggtcaccgatcgcaccagcgcaccgaaaattacagtgttggttgggcacgactccaacattgcctctctgttaacggcgctggatttcaaaccgtatcagttgcatgaccagaacgaacgcacgccgattggcggcaaaatcgttttccagcgttggcatgacagcaaagccaatcgcgatttgatgaaaattgaatatgtgtatcagagtgcggaacagttacgtaatgccgatgcgttaaccctgcaggcacctgcgcagcgtgtgacgctggaattaagcggttgcccgatagacgctgatggtttctgcccgatggataagtttgatagcgtgttgaatgaagcggtgaaataacagaaaactcccccgcgagaagcgggggagtcgctggttaaacgtttttacgttcgatggtctgttcgccccaaaaaaggctatctttatcggtcttagcaaaggctttgactaacacttcatcactaccttcttcccaaatcttttccgccattttttcgtcgtacccggcgacttcgaaaatggcctcggctatttccgggctcgtattgcgcagagatgcccattcaccgacgtgatgagctttcgcttcttgagttggcatgcgtatcctcctgttgaagattagccgttaagtttaactgccagacctgcgacatattccccttgataacgagcaatagacagttcttcctggctgggctggcgactaccgtcaccgcctgcgatggtggttgcgccgtacggcgtaccgccgcgaacctgactaacgtcaaataattcctgcgctgcgtagccaatagggacaattaccatgccgtgatgcgcaagggtcgtccaggtggatgtgatggtttgttcctgaccgccgccagtaccggtggaactaaagacgctcgccagttttccgtatagtgcgccggaagcccacaggccgcccgtctggtcgaggaaggtacgcatttgaccggacatgttgccaaagcgggtaggtgtaccaaaaataatggcgtcgtaatcggccagttcttgcggggttgcaaccggtgcagtttgcgttttaccgcctgctttttcaaataattgcggcggcatggtttccggtacacgcttaacgacaacttcagcgccatccactttgcttgcaccctcagcgactgcgcgtgccatcgtttcaatatgtccgtacatggaataataaagcaccagaactttagccatttctaaccactcctcgtgttatctctattccgtagcgattcgctaccacttatttaaagataagacgtccttttcagagtgcaaatttcacaaccacttatttgatttataacaactttcacaagcacgtaattttgtcgcaaaatgacacatttttatctcatcgcgtttttttaatcataagagcggcttatggataattattggagatgatatctattctcgctaagaagctgttgcaggatattaccaaacgcgggtctgcccgcgtcagttcactaagcttagtcccacgtagcgaaaatatggcagccgccatacgccgcgttaattctatgcaatatgatgtctatacccagacggaggtcagtaatggcaaaccatcgaggcggttccggcaattttgcagaagaccgcgaaagagcaagtgaagcaggtaaaaaaggtggacagcacagcgggggtaatttcaagaatgacccgcagcgcgcatctgaagcaggtaaaaaaggtggtaagagcagtcacggcaaaagcgacaactaaccgggctaatcaatgacgaatgcatttttgtctgtagctcgtcaaaaagccatcaccgccggttacccggtggttgatactgatgacaaatgtaagcttgcctgatgcgcgatgcttatcaggcctaccagaagattgcaatatattgaatttgcactgttttgtaggccggataaggcgtttacgccgcatccggcatgaacaatgcgtacgttgtcaacaatctgcaccgccggtaaccccggcggttttctgtttatggctcctgatgaacaacttctggcggtggaacgtcaaccaactttctgcttaacaacgcattgagtaaaatcgcgccaaaggttgctgtaccaatccctcccaacgtaaaaccgcccagcgtgagagcaaaatcacccgcgcccagcactaaggttactgcgaccataatcaaattaccgttctggcttaaatcgacacggttttgtacccatatccttgcgcctgcgacggcaatcagcccgaacacaacaatacttgcaccaccaataaccgcggccggaatggtatgaatcagcgcaccaaatttcggactaaagcccaacagcatggcgatgacggcagcagcaacaaacaccagcgtgctgtagactttggtcacggccatcacaccgatattttcagcataggtggtcacgccgctaccgccgacagagccggaaagcatcgttgccagaccatcgcctacgaatgcccgccccatatacgggtccatattgcgtccggtcatcccggcgactgccttgagatgacctaagttttccgccaccagaatcaccgccacgggcgcaatcagcatcattgcctgaccattaaaagcaggagtggaaaaatgtggcagaccgaaccaggcagcatggctgacgagagtaaaatcgacggcttttcccagccctaaaacgttggtcatcacgccatacagcagacaggcgacaattaatcctacgagaatcaataaccgctggatcatgccacgggtaaacaccgccaccagcccaatacacagcaccgtcattaccgccatccagctatcaaaggcgctagcgcttacacttttcactgcgataggcgctaagttcaggccaatcgccatcaccaccgcacccgtcaccaccggcggcatcagtcgttcaatccagcgcgtaccgattttcatcaccaccaggccaatgacggtataaaccagcccacaggcgataatcccgcccagcgcaatgctgatattcgggttaatgccctgaccgttaaagcccgtcgcggcgatcaccacgccgacaaaagccgcgctggagccgagataactggggacgcgcccgccggtaataaagaaaaacagtaacgtgccgatcccgctcattaaaatggaaagattgggatccagccccatcagaatcggcattaacaccgtcgcgccaaacatcgccaccgcgtgttgaacgcccattactgccgtctgagcaaacggcaatcgttcatccggcgcgaccacgccgctctctgtagaggtgctttttaactgccagtgaggaaaaccgaacattgccatcagctgtctccttaaggaggttaacaagcagggcgcatcagcgcgtgataactgcgatcgaaccacaccagcccgtagggtgtggtgtgacgatgaatcgcttcgatggcgcaaaacagaatgtcgtgggtgccgacgctcaccacctggctgatacggcagtcaaagctaaccagagcctcttccagttgcgggcatccggtcacccccgtctgccagcgggcggcggcaaagcggtgttccatgggcgttttgccgccaaaaaggttactaagcggctcctgcccggcgctaagtgtatttacacacagcgttcgattttcattgaatgccggccagacggacgccccacgattcaggcacaccagtaatgtgggcggcgtatcggtcacactgcagacggcgctggcggtgaacccggcgcgcccggctggaccgtccgtggtgataatattgaccgccgcgcccatgcaggacatcgcatcgcgaaaagtttgttgatcgacaatgttcatagtttgctccttacaacagcccgcaggcttcttcaaaggacagacgtggcaggcgcgcataaagcttgctgctatcgccatagccgatattaatcagcagattgctcttcagcgtgctgcccgtaaaaaaggcgtcgtccacgtgttgacggtcaaagccgctcatcgggccggtatccagtcccagcgcccggcaggcgacgatcagataggccgcctgcatggaactgttgcgaaacgctgtttcttcggcaagttgtgggctggaggtaaaccaactgcgggcatcaccgtggggaaacagtagtggtaaccgttcataaaattcactgtcccaggcgacgatagcggtgacgggcgcggtcagggttttttgcagattgccgctggaaagtgccgggcgcagacgttcttttccttctgccgtgcgggtaaacacgatccgtgccggagaacagttagcacttgtcggcccccatttcatcagggcataaatctcccgtaacgtctcatcgctgacgggtgtctcccgccagccgttgtgagtgcgggcatcggtgaacagggtgctaagcgcacctgggctaacggcttcgttcatagcaattccttacagggcggcttcacggtgatgtaacaggctggcaagcccgttgagtaacagagcattaaacgtttcgggatcggtcacgttgcaggcgtgtccgccatagggcatcaccattttctggctatcgggcagggcggcatgaagttcactggaacatgctgttggcaccagcagatcatcactggcgcagatgatttgcaccgggcagcggatgcgatccgcatggtgactaaagtcagcgcgtttgagggcgttaagtcgacgcagtaaattatttttgccctgaaaatgcgccagtgccagcgcgtcttctgcctccaggcgaggtgcgcgggccgccatccagtcggcgggatagaggaacaacggctgcgcttccacccatgcctgcgcgccgccgctatacagtaatcgttcgcgaacctgaaaacagcggcgcgtatgggcgtttattcgtagccagccgttaacgctgatcagcacagttacgctcgcgggataatccagcgccagctgcattcccaccagcgcaccgagcgcatggccgaccactgcgtaatgctcaatccctgcggctaccagcgcctgatgcagttccgctgccatctgggcgatactgtaatcttctgccagcgtgtcgggattattgccggtgccgcgctggtcgtaacagactacctgatactcctgctccagcaccgccagttgcggtaaccagtaactgccgctacccccaagaccgctaatcaacaccactacgggcgcatcagcataagggggaggactgagactaagtttcatcgcggcctcacttggcgatatgcgcaattgtggcgatttccaccagcgcgtcaggttttaccagtccgcactgaatgcagaatcgcgccggtttatcacccggaaaaaactcggcgtagatttcgttaatcgcggcgtaatttttccagtcggtaataaagatgctgttgaaggtcacatccgccatcgtgccacccgccgtctcgatcaccttgcggatagtttccagaacgtggcgggtttgcgcctttgggtcatcggcaaacagcacgttattatgttgatcaaaagccagcgtaccggagacatacaccacgccatcagccagcgtgccgggaacgaagggggccagcggtgcgctgctgccagcgggaataattacggattttggcatcgttaaactccttaagcgatatgagcaaaggacgtgggagaaagcgcgtcgcagaatgtttcgacgtcgctgacccagccaaaaaaggtttcgatattgaacaacgcggctttctgcgcaaatttcggccccgcctggtgagttgcgtcttcaagcaccacgccgaaatactccagaaaaaagccgtcgcgtagcgtgctttcgacgcagacgttggtagcgatgccggtgaaaaccagatggcgtattccgcggctgcgcaaaatgctgtccagcggcgtattgaagaaaccgctgtagcgcggcttcggcagcacaatatcgccaggctgcggcaccagttcatccaccagttgataatcccaggagcctttcgccagcaatttcccctgcagctgcggctgcttacgcatggttttcagggcgttgcttttatgaaaattcggactgccgggtccgccagcctcgacatactgttcatcccagccattttgaaaccagatgatcagcatccctgccgctcgcgctgcggtcacggcggtttgaatgttggcaatgaccgggcgagtggtactgacatcaaacccggcgagatctaagtagccgcctggcgtggcataagcgttttgcatatccaccacgatcagcgcactttgctgcggatcgaaggtaatggcttccggtcgagcggttaaggtcgtcatcatgccacctcctgagtcagcgcaggtagatgggcgcggcattgcatcagtggttgaatgcgctcgccgaaggtttcgattccgctcagaaaatcgtcgaaggttaacagcacgccttcggcaccaggcacgcttgcgacttcatctaacatgcgcgcgacactggcgtaagaaccgactaacgtccccatattgatgtttaccgcgctagtgggatcggccatctgacgaacgttggtgtcagtaccggagcgggtatctttctgactttgttcggttagccagcttaacgcctcttcatccgcgcccgctttgtagtgttcccatttggcgcgagcggcatcgtcggtttcatcggcaatcaccataaacaacacataagagccaacgtcgcgtccggtttgctctgcggcctgtttcatccgcgcagcggtcggggcgaaagccgtgggtgtatttacgcctttgccgaaacagaagttgaaatcggcataccgggcggagaacgccatgccagcgtcgctttgcccggcgcagatcactttcatggggacactcggttgcggactcacgcgacaatcattcatggtgaaaaaatcgcctttaaaatcgcttttccccgtgccccacaggtcgcgcagcacctgaacatattcggtgagatagtcgtaacgacgggagaaatagtcatcgccaggccagatacccatctgctcatactcgggcttttgccagccagtcacgaggttgacgccaaaacgcccgccagagatggagtcgatggttgcggccatacgggcgacgattgccggaggtaacgttaaggtggcagcagtggcgtaaatctgaatgcggctggtcacggccgccagccccgccatcaaggtgaagctctcaaggttgtgatcccagaactcagttttgccgccaaagccacgcagtttgatcatgctcagggcgaaatcgaaatggtagtgctccgctttttgcacaatggctttattcagttcaaaggtcggcatgtactgcggcgcgtgggtgctaatgagccagccgttgttgccaataggtacgaatacgccaattttcatcatcaacctctcttcgtctcgtaaagtgaaagtcagacggggcgctgcatcctgcatatccttttcagccgcgtattggcttgtttgcaaagcggatgccagtttttaaaaagttaatgttattaatctgttaacattacgttatctaaaatatctggtaaaaagtggactaaacggtcaaaacagttgcacataaaacatgcatctgtgcgcgatgagagtgcagaaggtcgaggccgggcgggggttttgctatcctgttgccaatctacaagaggggagagcgcatgacgcaaggcgcagtgaaaacaacgggtaaacgtagccgcgcagtaagcgcgaagaaaaaagcgattcttagcgcagcactggacacttttagtcaattcggttttcacggcacaaggctggagcagatcgcagagttggcgggtgttagtaaaaccaatctgctgtattactttccgagtaaagaggcgctgtatattgccgtgctgcggcagattctcgatatctggctggcaccgttaaaagcgtttcgtgaagatttcgccccgctggcggcgatcaaagagtacatccgtctgaagctggaagtcagtcgcgattatccgcaggctagccgcctgttctgtatggagatgctggcaggcgcgccgctgttaatggatgaactgacgggcgatttgaaggcattaattgatgagaaaagcgcgctgattgccggttgggtcaaaagcggcaaactcgcgccgattgatccgcagcatttgatttttatgatttgggcttccactcaacattacgccgatttcgcccctcaggtggaggcggtgacaggcgcgacgttgcgcgatgaggtatttttcaatcaaacggttgaaaacgtgcagcggattattattgaggggattcgaccacgttaaagatgccggaggaggttgtaacatcctccggctacctgtttaacctatagtcattaagctggcgttaccgccagcggcagcggtattcacactcaggctacgctcgatatacagccgttccagaaggatattgctttcgccacgggcaaaaccctgcacgctaacaattgtgccatcccgcgcggcaactgcttcacacaatgcgcgaagctgatcgctatcaccgtggaagatcaccgcatcaaacggttgagcggttatattttccgctttcgccagttgaatacgttcgctgactgcgcttggcaatgccttcactaactgacgatgcagcgcgtcatccggccacagtacctggctgcccaccgccagcacggcggcgagctgagtcagcgcatcctgctcatcatcggcaatacacaacacgcgctcacgcggcagcagcgtccaggtgttgcgttcacccgtcggccccggcagcaatcgttgtgttcctgcctgcgccagctcgccatattgcgtacataacgcctgcaattctggacgatttgctgcccattcccgcagtgcatttagcggctgagtcaatgcggctttcaactgcgcatcgaccggatactttgcatcctgacgcgcgagcgtcactgccagcgcactttccgggcgattcgccagcagacggtagagatagagcggaccgcctgctttcggcccggtaccggacaacccttcgccgccgaacggctgcacaccaaccactgcgcccaccatattacggttaacatacaggttaccaacatgggcgctgccagtgacctgggcgatggtttcatcaatgcgcgtatggacgccaagcgtcagaccataaccggaagcgttaatctgctcgatcagctctggtagctggttacggttgtaacgcaccacatgcagcaccggaccaaagacctctttttgcaattcggcaaagtcatccagttcgatcagcgtcggggcgacaaaggtgccgctttgccattcacgggcatcttcgctgttttcccgcaccgcctggaacaccggacggcctttgctacgcatggtctgaatatggcgctcaatattggctttcgcttcgctatcaatcactggaccgatatcggtggtcaggcgacccggattacccatccggcattcggccattgcgccgcgcagcattttcaacgtgtggtcggcaatctcatcttgcaggcacagcacgcgcagcgcgctacaacgctgacccgcactgtcgaacgcgctggccagtacatccacgacgacctgttcggtcagtgcactagaatcgacaatcatcgcgttcatgccgccggtttcagcgatgagcggaatagggcgaccctgagcgtccaggcggctggcgatattgcgctgcagtaacgtagcgacttcggtactaccggtaaacatcaccccgcgcacgcgatcatcacccgtcagttgcgcgcccacggtttcaccccgacctggcagcaattgcaccacgcctggcggtacacccgcttccagcaaaatggcgatcccttgcgcggcaatcagcggcgtttgttctgccggttttgccagcacgctgttacctgccgccagtgcggcggcgatctgcccggtgaaaatagccagcgggaagttccacggactgatacacaccacaggccctaatggacggtgggtttcgttagcgaaatcatcccgcacctgtccggcgtagtagtggagaaaatcgaccgcttcgcgcacttcggcaatggcgttactgaaggtttttccggcctcacgcaccagaataccaatcagttgctgcatctggctttccatcagcacggcagcgcggtgcaaaatcgctgcgcgttcagccggaggcgtggcaaaccagattggcgcgttattaaccgcactttccagcgcctgttctacttcacgcggcgtggcttcacgcacatagcccacaatatctttcggttccgcagggttaataacggggctcatctcacctgccgctaccggttgttccagcattggcaaggcctgccatttttgcagtgcactattgagcagggcagaggagaggctggccaggcggtgttcgttagcgagatccagccctgcgctgttgtcgcgcccgtgaccgtaaagatcgcgcggcaggggaattttcggatgcggtaatccagtttgcccttcctgttgcgccagtttttctacagcagtgaccggatcggcgaccagttcatccagtggcaaagaggtgtcggcaatacggttaacaaagctggtgttagcaccgttttccagcaggcgacgcaccagatacgccaacagcgtttcatgtgtgccaaccggagcataaatacgacacggacggttaagtttgccgtcggcaactttcccggtgacctgctcatacagtggctcgcccataccatgcaggcactggaactcgtactgacccgggtagtagttctgccccgccagttgataaatcgccgccagcgtatgggcgttgtgcgtcgcgaactgcgggtagattagattcggcaccgccagcagctttttcgcacaggcgagataagaaacgtcggtatacaccttgcgggtataaaccggataaccttcaaggccgtccatctgcgcacgcttaatttcactatcccagtacgcgcctttcaccaggcgaatcatcagacggcgacggctgcgggtggcgagatcaatcaggtaatcgatcaccaacgggcagcgtttttgataagcctgaataacaaaaccgatgccgttccagcctgccagttccggctcgaaacagagtttttccagcagatcgagggagatctccaggcgatcggactcttcggcgtcaatgttgataccaatatcgtactgacgcgccagcagggtgagacttttcagacgcgggtaaagctcttccattacccggtcatactgggcgcggctataacgcggatgcagcgcgctcagtttgatactaatgcccggcccttcatagatgccacgaccgttagacgctttaccgatggcgtgaatcgcctgctgataggaaaccatatacgcctgtgcatctgcggcggtcagcgcggcttcgcccagcatatcgtaagagtaacggaaacctttctcttccagcttgcgggcattggctaacgcttccgcgatggtttcgccagtgacgaactgctcacccatcaggcgcatcgccatatccacacctttgcggatcagcggttcaccgcttttaccgataatgcggttcaggctgcgggagaggctggcttcgttatgggtggaaaccagtttgccagtaaacagcagcccccaggtggcggcattaacaaacagactcgggctacgaccaatgtgactctgccagttaccgttgctgattttgtcgcgaattaacgcgtcgcgggtggctttgtcgggaatacgcaacaacgcttccgccagacacatcagcgccacgccttcctggctactcaggctaaactcctgcaataacccctggaccatacctgcgcgaccactggcatttttttgattacgcagtttatcggccagctgatacgccagtttgtgcgcctgttcagcaactggctgcggcaggcgggcttgttccagcagcatagaaaccgcttcggtttccgggcggcgataggccgcggtgatcgcggcgcgggaaacgctctggggcaatatttgctcggcaaagtcgaggaatggctggtgtggttcctctgccggagtcggtgcttcatcgctctcattggccgcgccagaaagcagcgcaggtagctccggcagagtatcgctgttttccagttgttcgagataagaaaaaatcgcctgcttaattaaccagtgtggtgtgcgatcgatacgtgtcgcggcagacttaatacgctcacgcgtcgcgtcgtccagcttaacccccatggtggtggttcccatgccattactcctgttgttcagaaaggtgcaacttaacgttatcgtgaaatatccatgatgttgcaactttgtgcaaccatgttaaatgtgacatgcgtagcaagcttaaaaatgaatgaaatgttaataaaagaaatcgatatgacagggattaaaaaaataactcagactttttctctgcggcagttaacatttttgaaaggtgcaaccgcaaaaaatgtgagagagtgcaacctgatgaaaaatagtgtcgctgagcactaaaatttaatgtaaatggtgtgttaaatcgattgtgaataaccagcgcttccggcaggatacggtcgccctggtaaaacataaactctgttaccccgttccggtggcagatataacggcaagtttcgacattgccgataataattttttggagactttagatggctattagcacaccgatgttggtgacattttgtgtctatatctttggcatgatattgattgggtttatcgcctggcgaagtacgaaaaactttgacgactatattctgggcggtcgtagtcttgggccattcgtgacggcattaagcgcgggtgcgagcgatatgagcggctggctgttaatggggttgccgggcgctgtttttctttccgggatttccgaaagctggatcgccattggcctgacattaggcgcgtggattaactggaagctggtggccgggcggttgcgtgtgcataccgaatacaacaataacgccttaacactgccggattatttcaccgggcgctttgaagataaaagccgcattttgcgcattatctctgcgctggttattttgctgttcttcaccatttattgcgctagcggcattgtggcaggcgcgcgtctgtttgaaagtacctttggcatgagctacgaaacggctctgtgggcgggcgctgcggcgacgatcctttacacctttattggcggtttcctcgcggtgagctggactgacactgtacaggccagcctgatgatttttgccctgatcctgacgccggttatcgtcattatcagtgtcggtggctttggtgacagcctggaagtgatcaaacaaaagagcatcgaaaacgttgatatgctcaaaggtctgaactttgttgccattatcagtctgatgggttgggggctgggttacttcgggcagccgcacattctggcgcgttttatggcggcggattctcaccacagcattgtccatgcgcgtcgtattagtatgacctggatgatcctctgcctggcaggggcggtggctgtcggcttctttgggattgcttactttaacgatcatccggcgttggctggtgcggtaaatcagaacgccgagcgtgtgtttatcgaactggcgcaaattctgtttaacccgtggattgccgggattctgctgagcgcaattctggcggcggtaatgagtaccttaagttgccagctgctggtgtgctccagtgcgattaccgaagatttgtacaaagcgtttctgcgtaaacatgccagccagaaagagctggtgtgggtagggcgtgtgatggtgctggtggtggcgctggtggcgattgcgctggcggcaaacccggaaaaccgcgtgctgggcttagtgagctacgcgtgggcaggctttggcgcggcgtttggtccagtggtgctgttcagcgtgatgtggagtcgcatgacgcgtaacggtgcgctggcggggatgatcatcggtgcgctgacggttatcgtctggaaacagttcggctggctgggactgtacgaaattattccgggctttatcttcggcagtattgggattgtagtgtttagtttgctgggtaaagcgccgagtgcggcgatgcaaaaacgctttgccgaggccgatgcgcactatcatagcgctccgccgagtcggttgcaggaaagctaagggacttagcctgcggcggttttgtttggcttcagcagcgggttgcgctcccttaatgtgcctcgccatataaattgaatggtgcagggagcgcgcagggggcggccaatcgccgccgccccctgctgtcccggccttcggggaacgcttcagcgattttgacgccaccaacacccgagctgttattatgttccgggcaaaaagttagatttgataatcgcggatggacgaaattgcttgatacacccgcttatcagttttacatggaagctctgatgcattgagtctggacagttttgtcggctggatacggcgtttacgcggcatccggcaagaacacatggttctttgcaaacaatcccatctttctaccctggaataatcgtttatatcccttggcattacctctctttgtttacattccaacatcattttataaacattccgcttgtgtttttctttgccgtaatgataatcgctatcactgcgatttacttttctttgcatagattgactcagaaaaacgtttaagggtgggtggcatgtttgttccgtttctcattatgttgcgcgaaggacttgaagccgcgctgattgtcagtttgattgccagctatcttaagcgtacccagcgaggccgatggattgtgtgatgtggattggcgtgttgcttgccgctgcgttgtgcctgggcttgggtatcttcattaacgaaaccaccggcgaatttccgcaaaaagaacaggaactgtttgaaggtatcgtggcggtgatcgccgtggtgatccttacctggatggttttctggatgcgcaaagtgtcgcgcaacgtcaaagtgcaactggaacaggcagtcgatagcgcattgcagcgtggaaatcatcatggctgggcgctggtgatgatggtcttttttgccgttgcaagggaagggctggagtcggtctttttcctgctggcggcatttcaacaagatgtcgggatctggccgccgctgggtgcaatgctcggtcttgctactgccgtggtgctaggcttcctgctctactggggcggtattcgcctcaatcttggtgcattttttaaatggaccagcctgtttattctcttcgtcgccgcagggctggcagctggtgccattcgcgcatttcatgaagccggattgtggaaccactttcaggaaatcgccttcgatatgagtgcggtgctctcaactcactcgctgtttggcacgctgatggaagggatttttggctatcaggaagcgccgagcgtcagcgaagtcgccgtctggtttatttatctcatcccggcgctggtggcatttgctctgccaccacgcgcaggggcgacagcgtctcgctccgcgtaacaaatacgacgcaaactcttgcttagttacaacatactttaaagggatagtctcgtcatgaccattaacttccgccgtaacgcattgcagttgagcgtggctgcgctgttttcttctgcttttatggctaacgccgctgatgtgccgcaggtcaaagtgaccgtgacggataagcagtgcgaaccgatgaccattacggttaacgccgggaaaacacagttcattattcagaaccacagccagaaggcgctggagtgggagatcctcaaaggcgtgatggtggtggaagagcgggaaaatatcgcccctggctttagccagaaaatgacggcgaatttacagcctggcgaatacgatatgacctgcggtctgctgactaacccgaaagggaagttgatcgtcaaaggtgaggcaacggcggatgcggcgcaaagtgatgcgctgttaagtcttggtggtgcaattactgcatataaagcgtatgtcatggcggaaaccacgcagctggtgaccgacaccaaagcctttaccgacgcgattaaagcaggcgatatcgaaaaagcgaaagcactgtatgcaccgacgcgccagcactatgagcgtattgaaccgattgctgaactgttctccgatctggatggcagcattgacgcccgtgaagatgattacgagcaaaaagccgccgacccaaaattcactggtttccaccgtctggaaaaagcattgtttggcgacaacaccaccaaagggatggatcagtacgctgagcagctttataccgatgtggtcgatttgcaaaaacgcatcagtgaactggctttcccacctagtaaagtggtcggcggcgcagccggactgattgaggaagtggcagccagcaaaattagcggtgaagaagatcgctacagccacaccgatctgtgggatttccaggctaacgttgaaggcagccagaaaattgtcgatttgctgcgtccacaactgcaaaaagccaacccggaactgctggcaaaagtcgatgccaactttaaaaaggtcgataccattctggcgaaataccgtactaaagacggttttgaaacctacgacaaattgaccgatgccgaccggaatgcactgaaaggaccgattactgcgctggcggaagatctggcgcaacttcgcggtgtgctgggactggattaagcgttatgcagtataaagatgaaaacggcgtgaatgaaccgagtcgccgacgtttactgaaagtgataggtgcactggcgctggcgggaagttgtccggtcgctcatgcacaaaaaacgcaaagtgcgccgggtacgcttagtccggatgctcgcaatgagaaacagccgttttatggtgagcatcaggcagggatcctgacgccacaacaggccgcaatgatgctggtggcgtttgatgtgcttgccagcgataaagccgatcttgagcggttgtttcgcttgttgactcagcgttttgcttttctgactcagggcggagcagcaccagaaacgccaaatccgcgcctgccaccactcgattccggcattcttggcggctacattgcgcccgataatctcaccatcacgttaagcgtgggtcacagtttgtttgatgagcgctttggccttgcgccacagatgccaaaaaagctgcagaagatgacgcgtttccccaacgacagcctggatgcggcgttatgtcatggtgatgtgttgctacagatttgcgccaacacccaggacacggttatccatgcgctgcgcgatatcatcaaacacacgccggatttgctcagtgtgcgctggaagcgggaagggtttatttccgatcacgcggcgcgtagtaaaggcaaagagacgccgattaatttgctgggtttcaaagacggcactgccaatcccgatagccagaatgataagttgatgcaaaaagtggtgtgggtaacggcagatcagcaggagcctgcgtggacaatcggtggcagctatcaggcagtacgcttgattcagtttcgagtggaattttgggacagaacgccgctgaaagaacagcagacgatttttggccgtgataagcaaaccggtgcgccgctgggaatgcagcatgagcatgatgtgcctgattacgccagcgacccggaagggaaggtgatcgcgctggacagccatatccggctggcgaatccccgcacggcggagagtgagtccagcctgatgctgcgtcgtggctacagttatagtctgggcgtcaccaactccgggcaactggatatggggttgctgtttgtctgctaccaacacgatctggaaaaaggcttcctgacagtacaaaaaaggctcaatggcgaagcgctggaggaatacgttaaacctatcggcggcggttatttttttgcgctgccgggggtgaaggacgcgaacgattatttcggaagcgcgttattgcgggtttaatgtttttaggcggataaggcatttgtgcgcagatgcctgatgcgacgcttgcgcgtcttatcatgcctacaatcagtgcgggtttggtaggctggataaggcgttcacgccgcatccggcgatcgtgcactgatgcctgatgcaaatcctgctgaaagcacacagcttttttcatcactgtcatcactctgtcatctttccagtagaaactaatgtcactgaaatggtgttttatagttaaatataagtaaatatattgttgcaataaatgcgagatctgttgtacttattaagtagcagcggaagttcccggcagtgatagtcagtcactatggagatcgcggatggtaacgtcctgtactggacatgttttagataatcaacgcgccaccactcgcggagttttctcctccggtagtcatctcgtcactttgcattttcaacctcatcctttctttagttgtgttaccgacgccgtaaacggtgcgcgtagccgttttagcgcattttatccaaaagcaaactatggcttacaaggaagccaaccctctgatgttcgtgcgcataatcgcgctgccaacggcgcgtgtgatgaatacaaacaactcaaggtgctctccatgggaagacaaaaagcagtgatcaaagctcgtcgcgaggcaaaacgtgtgctgagacgggatagccgcagccataagcagcgtgaagaagaaagcgtcaccagccttgtgcagatgggcggcgtagaagccattggtatggcccgcgacagtcgcgatactagccccatcctcgcgcgaaatgaagcgcaattgcactatctgaaggctattgagagtaagcagctgatattcgccacgggcgaagccgggtgcggaaaaacctggatcagcgcagcaaaagcggcagaggccctgatacataaggatgtcgacaggattatcgtcacccgtccagttctgcaagccgatgaagatcttggcttcttacctggagatatcgcagaaaagtttgctccctattttcgcccggtctacgacgtgctggtccggcgcttaggggcttcctttatgcagtactgcctgcgaccggaaatagggaaggtggaaattgcgccgttcgcctatatgcgtggacgtacctttgaaaatgcagtcgtcattcttgacgaggcgcagaatgtgactgccgcgcaaatgaaaatgtttttaacccgcctcggggagaacgtgacggttatcgtcaacggtgatatcacgcaatgcgatttgcctcgcggcgtgtgctccggattaagtgacgcgctggaacgtttcgaagaagatgaaatggttgggatcgtccggttcggtaaagaggactgcgtacgtagcgcactttgccaacgtacgctgcatgcctacagttaagtgtgttatcggtgcagagcccgggcgaaccgggctttgttttgggtgttcccggtgtgtgcaatatacgaaaaaaaagcccgtactttcgtacgagctcttctttaaatatggcggtgagggggggattgactcgcttcgctcgccctgcgggcagcccgctcactgcgttcacggtctgtccaactggctgtcgccagttgtcgaaccccggtcggggcttctcatccccccggtgtgtgcaatatacgaaaaaaaagcccgtactttcgtacgagctcttctttaaatatggcggtgagggggggattcgaacccccgatacgttgccgtatacacactttccaggcgtgctccttcagccactcggacacctcaccaaattgtcgttcctgtcttgctggaacgggcgctaatttagggaaatcatgacctgaggtcaacaaactttttgaaaaaatcgcgcgtttattcaaacttcaatcaatgtgtggttttaataagcgaaatctgctttttttgccaccgaccacggatttgttatgctggtggcctttgtagatcataacgataagtgcgaataaatttcgcacaacgcttttcgggagtcagtatggatatcatcttttatcacccaacgttcgatacccaatggtggattgaggcactgcgcaaagctattcctcaggcaagagtcagagcatggaaaagcggagataatgactctgctgattatgctttagtctggcatcctcctgttgaaatgctggcagggcgcgatcttaaagcggtgttcgcactcggggccggtgttgattctattttgagcaagctacaggcacaccctgaaatgctgaacccttctgttccactttttcgcctggaagataccggtatgggcgagcaaatgcaggaatatgctgtcagtcaggtgctgcattggtttcgacgttttgacgattatcgcatccagcaaaatagtagccattggcaaccgctgcctgaatatcatcgggaagattttaccatcggcattttgggcgcaggcgtactgggcagtaaagttgctcagagtctgcaaacctggcgctttccgctgcgttgctggagtcgaacccgtaaaagctggcctggcgtgcaaagctttgccggacgggaagaactgtctgcatttctgagccaatgtcgggtattgattaatttgttaccgaatacccctgaaaccgtcggcattattaatcaacaattactcgaaaaattaccggatggcgcgtatctcctcaacctggcgcgtggtgttcatgttgtggaagatgacctgctcgcggcgctggatagcggcaaagttaaaggcgcaatgttggatgtttttaatcgtgaacccttaccgcctgaaagtccgctctggcaacatccacgcgtgacgataacaccacatgtcgccgcgattacccgtcccgctgaagctgtggagtacatttctcgcaccattgcccagctcgaaaaaggggagagggtctgcgggcaagtcgaccgcgcacgcggctactaataaagcatcaggattcctgctatccttggcgggaattgaatacaggagagagttatgtatcccgtcgaccttcatatgcataccgttgccagcacacatgcatatagcacattaagtgattacattgcccaggccaaacaaaagggcattaaactttttgcgatcaccgatcatggcccggatatggaagatgcgccgcatcactggcacttcattaacatgcgtatctggccgcgagtggttgatggggtagggatcctgcgcggcatcgaagctaacattaaaaatgttgatggtgaaattgactgcagcggtaaaatgtttgacagcctggatctaattattgccggttttcatgagccggtttttgcgccacatgacaaagcgaccaatacacaagcgatgatcgccactatcgccagcggcaatgtgcatataataagccatcccggaaatcccaaatatgaaatagatgtgaaagccgttgctgaagcagccgcgaaacatcaggtggcgctggaaatcaataattccagttttttacacagtcgtaagggcagtgaagacaactgtcgtgaggtagccgcagcggtacgtgatgctggaggttgggtggcattaggcagcgattctcacaccgcgtttaccatgggggaatttgaagagtgtcttaaaatcctcgacgcggtagattttccgccagagcgcattttgaatgtttctccgcgccgcttactgaacttccttgaatctcgcggtatggcaccgattgcggaatttgcagacctttaattactagtaatggaaatatattaatgaacgagttttctatcctctgtcgtgtgctgggtagcctctattaccgccaaccacaagatcctttactggtgccgctgtttaccctgattcgtgaggggaaactggctgcgaactggccactggagcaggatgagttgctgacacgtttgcagaaaagctgtgatatgacgcaagtctctgccgattacaatgcgttgtttatcggcgatgaatgtgctgtgccgccatatcgtagcgcatgggttgagggcgcgacggaagcggaagtgcgcgcttttctttctgagcgagggatgccattagcggatacgccagccgatcacatcggcacattgctgctcgcagcttcctggctggaagatcagagtacggaagatgagagcgaagcactggaaacactgttcagtgagtatctgttaccctggtgtggtgcgttccttggcaaagtggaggcccatgcaaccacgcctttctggcgcaccatggcaccgctaacccgcgatgccattagtgcaatgtgggacgagctggaagaagattctgaagaataagtgtgatctacgtcactcataactgcaacggataatttgttgttgcataaaatgtgtgctcgatctcattcatggccgcgttttctgctatcatgcgcggcatgaacatacttctctctattgcaatcacaacaggcattctctccggtatctggggatgggtggctgtttccctgggcttactaagctgggcgggcttcctgggctgtacggcctactttgcctgcccgcaaggtgggctgaaagggctggcgatctccgctgcaaccctgcttagtggcgtggtgtgggcgatggtcattatttacggtagtgcactggcaccacatctggaaattctcggttatgtcataaccggtattgtcgcgtttctgatgtgtattcaggccaaacagctgctgcttagttttgttccggggacgtttataggcgcatgcgcgacgtttgccgggcagggtgactggaaactggtgttacctagcctggcgcttgggctgatatttggttacgcaatgaaaaacagtggcctgtggctggcggcgcgtagtgcaaagacggcgcaccgtgagcaggaaatcaaaaataaagcgtgaggggcactcacgctttcgcttaaacagtaaaatgccggatgataattccggcttttttatctgtcaggattccggtggaacgctcatatggcggtatttcaccagaatgtcattctgccgttctgctttattttgcaaatcccacagaccacggtcgataccatcattaatcaggaaaatgacccctgtttcgatagcgctcatcaggcacagcataacaggttcgttgctggtgtaacccacttccccttcaagcaagcgctggtagtcaataaagcggaaaaccccggcctgaacttcataggaaagtatcgtcttactggtgttcacgctagaaaggatctcgccggtactcacattgacgacgcgcaggttcacggcaatctgatcgagctggtattgcgtgtcggcaccgatgccaaaatatcttgccccaaccccgccagatttgacgttgctttcataaccgataatgctaccttcaaccatgatatttgccgccgttaaagattgcagcgggattcggttattaatggcaaccgtgccgttttcttgtgccgcacgaataatcttgcgctcgttaagcaggttttgtaagccctggcgctccagcggtataaaccagcgagaatctttcagtgccgtgaccagcattgccgtggcgctttgcggaacagcagtggagaagttacttgccgggtagggtttaaattgcccggtttcgtcctgaatgttgtatacgctaacaaagattttacccgtcggcgctggcagatgggtcaaatctttgtagctctgagcacgaggcattaatgtcggtctggcggcttctttaggcggggcggttaagcatccgctcagtaacatgacggcaaccaaaagaaataagcgctgcatgattattttccttatgaagctggggcttaaaaatcggtactgttattttgtaaaccgctaacctggatggtgctggtttgtccggttttacgatctgtcacgttcaactgcaattgaccatcgcggttggcaatatcgacaatataatcgttggtcaccatgcggcccggtttaccggtattaatattgctcagtagcccacctaaaatttgactctggatggcctgagtaaagttatctaacgcactgggtgtttcaataccaaagtcatcgttatagctcggatctttataagagttttgggcctgagcgctatttaataaaaaagcgccattatttgggttaccaccaaagtttggattacggaactggaaagtcatggttccagcccaacttaatgggctaataagcatgagtagaactactgcatgtttgacacgcattgcagcctccgaacaattttttatttagaattcatcatgcgccaaatcgcccgtacttaataacgcctgatttatctggcgacgatttagtgcttcttcagtttgaatcagtgcaaagacgacagttttctcgaagtctcttttcaacggaaataaaaaagtctggaaaataacgtcctgattgaccgttatagtgatccagcttccccatcgtgcactgggcctttcattaatcgttaagttacccgtatagtcactttcccatttatcactaaaggctcggtaaaaatcatggccaatagaactaacagtatggtcagttagcaatcccgggacttctacctcaacggcgtgaagattccctgcggcgaacagaaattctgccgccacaatccagcgtaaataacgtttcatggctttatcgcctgaggttatcgtttgcccaggaaaccgcttgtgtccggttttttacggctatcttcttgaaaagattataaagatgcgttttaaccgtattttcgctgatgaacaagctacgagcgatctcgttattagacgcgccgatacgcagcttattcaggatctctttttcccgatgagtaaggagggcactttccgtgctgttataacgatagttaccactatgcgtaatcaggtagctggcaagcttttgcgtaaagtagcattcgccgcgcaggacgccttgcaacccattgacaacacgttcttgatcctccatggaataaaaaacgccgttgatatgaggccagttttcaatgtcgcggtacgggtaatcttcaggcgtatttagcaacaatattttgatattgttgtttttcctgctcaaagtatcctgccaataatggataagctttttatccgcttccatcatatccagaagaataatagagccactagagatatcgtccagagaacgttgaatattatgtaattttcctgtaattgccaggctttgtttaaggtgctgcaagagagctgtcgcctgcaaagaagatttagtgatcaacaataatgtatgaccatgaatactatggacttcattaaacatgatgaaaccccgctttttttattgatcgcacacctgacagctgcctctaaaatagaagcaccagaagtactgacagatgttgcactgctgtgtgtagtaataaatcagccctaaatgggtaaaatataaaactaatggattacatctgatttcaatctagccattacaaatcttaaatcaagtgttaaacatgtaactaaatgtaactcgttatattaaaatgttaaccttaaggttttattaagtttagaaatgatagaaaagttgtacatttggtttttattgcacaattttaaaaaatcatacaaatggtgataacttactaataatgcatataaaaaatatttcggtgtagtcctttcgtcatgtaaaacgttcttgttttttctccacacctccgtggacaattttttactgcaaaaagacgaggtttgtcacggcttgtgcgcaagacatatcgcagcaatcagcgacgggcaagaagaatgactgtctggtgctttttgatagcggaaaacggagatttaaaagaaaacaaaatatttttttgcgtagataacagcgtatttacgtgggttttaatactttggtatgaactaaaaaagaaaaatacaacgcgcgggtgagttattaaaaatatttccgcagacatactttccatcgtaacgcagcgttaacaaaatacaggttgcgttaacaaccaagttgaaatgatttaatttcttaaatgtacgaccaggtccagggtgacaacatgaaaaacaaattgttatttatgatgttaacaatactgggtgcgcctgggattgcagccgcagcaggttatgatttagctaatagtgaatataacttcgcggtaaatgaattgagtaagtctagttttaatcaggcagccataattggtcaagctgggactaataatagtgctcagttacggcagggaggcagtaaacttttggcggttgttgcgcaagaaggtagtagcaaccgggcaaagattgaccagacaggagattataaccttgcatatattgatcaggcgggcagtgccaacgatgccagtattagccaaggtgcttatggtaatactgcgatgattatccagaaaggttctggtaataaagcaaatattacacagtatggtactcaaaaaacggcaattgtagtgcagagacagagccaaatggctattcgcgtgacacaacgttaatttccattcgacttttaaatcaatccgatgggggttttacatgaaacttttaaaagtagcagcaattgcagcaatcgtattctccggtagcgctctggcaggtgttgttcctcagtacggcggcggcggtaaccacggtggtggcggtaataatagcggcccaaattctgagctgaacatttaccagtacggtggcggtaactctgcacttgctctgcaaactgatgcccgtaactctgacttgactattacccagcatggcggcggtaatggtgcagatgttggtcagggcagtgatgacagcagtatcgatctgacccaacgtggcttcggtaacagcgctactcttgatcagtggaacggcaaaaattctgaaatgacggttaaacagttcggtggtggcaacggtgctgcagttgaccagactgcatctaactcctccgtcaacgtgactcaggttggctttggtaacaacgcgaccgctcatcagtactaatacatcatttgtattacagaaacagggcgcaagccctgttttttttcgggagaagaatatgaatacgttattactccttgcggcactttccagtcagataacctttaatacgacccagcaaggggatgtgtataccattattcctgaagtcactcttactcaatcttgtctgtgcagagtacaaatattgtccctgcgcgaaggcagtagtgggcaaagtcagacgaagcaagaaaagacccttagtttgcctgctaatcaacccattgctttgacgaagttgagtttaaatatttccccggacgatcgggtgaaaatagttgttactgtttctgatggacagagtcttcatttaagtcaacaatggccgccctctagtgaaaagtcttaatttgttgaaatatcgagcataagatgaatctggagagaatggtctgctgcgaatcagccaacctgaaagtatggataacacaaccctcaaggatgactaatcattgaggaaatagaataaatgttcagaccttttttaaactctcttatgctcggcagtttgttttttccttttattgccattgctggaagcaccgtgcaagggggcgtgatccatttttatggccaaattgtggaaccggcatgtgacgtcagcacccagagtagtcccgtagaaatgaactgcccacagaatggttctattccgggcaaaacctactccagcaaagcgttaatgagcggcaatgtcaaaaacgcgcaaatagccagtgtaaaagtgcagtatcttgataaacagaaaaagctggctgtaatgaacatcgaatataactaagtttctgaacaactcacgttgctgagcagaaaaatgcgatttaaccaaaaagcctgctgtacacttaagaaacaagaaggtgtaaggaggcgttatgaaaacgcgtattcatgttgtgcagggtgatattaccaaactggccgttgatgtgattgtgaatgcggctaatccgagtttaatgggaggcggcggcgtcgatggggccattcatcgcgcagcgggtccggccctgctggatgcttgtttaaaagtcaggcaacagcagggcgattgccctacggggcatgccgttattacgcttgcaggcgatcttcccgctaaagccgtagtgcacaccgtcgggccagtctggcgtggtggtgaacaaaacgaagaccagcttttgcaggatgcctatctcaatagcctacgactggtggcggcaaacagctatacgagtgtggcttttcctgcaatcagtactggggtttatggttaccctcgtgcggcagcggctgaaatcgcagtaaaaaccgttagtgaatttattacccgtcacgctttacccgaacaggtatactttgtctgttatgatgaagaaaacgcccacctctacgaaagactccttacccaacaaggagatgaatgatttgccccggctggcgagcgcggtgctgccactgtgtagccaacatcccggtcagtgtggcctttttcctctggagaaaagtctggatgcgtttgccgcccggtatcgtctggccgaaatggcagagcatacgctcgatgttcagtattacatctggcaggacgatatgagcggtcggttactgttttccgccctgttagccgcagcaaagcgtggcgttcgcgtccgtttgttgctggacgacaacaatacgcccggacttgacgacattttacgcttgcttgacagtcatccacgcattgaagtccggctttttaatcctttcagctttcgcttgctgcgtccgcttggttatatcaccgacttttcccgtcttaatcgccgtatgcacaataaaagtttcactgtcgatggcgtggtgaccctggtgggaggacgaaatattggtgatgcctattttggagcaggggaggagccactttttagcgatttagatgtcatggcaataggacccgtggtagaggacgttgccgatgatttcgcccgctactggtattgcaaaagcgttagtcccttacagcaggtgctggatgtcccggagggtgaaatggcggatcgcatcgagttacccgcctcctggcataacgatgccatgacgcatcgttatttacgcaaaatggaatccagtccatttataaatcatctggttgatggaacattgccgcttatctgggcgaagacacgtttattaagtgatgatccggcgaaaggggagggcaaggcaaaacggcatagtctgttaccgcagcgcctgttcgatatcatgggcagtcccagtgaacgcatcgatattatctcttcctattttgtaccgacacgcgcaggtgtggcgcaactcttacggatggtgagaaaaggggtaaagattgcgatcctaaccaattctcttgccgctaacgatgttgctgtcgtccatgccggatacgcgcgctggcgcaaaaaattgctccgctatggcgtggaattatatgaactcaagccgacgcgtgaacaaagtagtacgttacacgatcgcggcataaccggtaattccggagccagcctgcatgctaaaacctttagcatcgatggtaaaacggtgtttatcggctctttcaatttcgatccgcgtagtacattgctcaatactgaaatgggcttcgtgatagagagcgaaacgctggcacagttaattgataaacgctttattcagagccagtatgatgcggcctggcagctccgtctggacaggtggggacggatcaactgggttgatcgtcatgcaaagaaagagattattctcaaaaaagaacccgccaccagtttctggaagcgggttatggtcagactggcgagcatattgcccgtggaatggttattgtaaatgtggcttaacgggctggtgctttatcgttctcacgcttaacaaccggtttaccagagaacaaaaacttcagtaacgggatgcgcaaatgaatttcatacagaattatcgcaatccctactacaaatatcaggccacagagaaaaccaagccagttggaggtgatgtgcggtgtaatgtatgcgccgaaaaacagcgttaacgggtggtgaaccagatagataaacaggcttgcgttaacaaaataagtcacccgcgcactctggaagttaagcaaacggtggccaaaggagaagaccacattcaccatccacagaccgaggaccatggtgatcacgctctcggtttcgtacatccaggcatcgccactgccatagcgctggttgagtaaataagcgacaaacgccaatgctgctgcaagggtacagccacgagacggcgtggtaaacaaggctttaagatgagggaaaatgaaagccagtgcgccgaggataaagaacggcaaataaaacagcgtttgcatgacaataaaattgaacatgccattactcagaatgggcggatacacaataaaaatcgttcttcttattaccgcataaccgatgccgaggcataaaaaaatcacgcttagttttaccatgctgaattttttattcgttttatcagaattttctaaattatttctgatgcgcttaaatatccatacgcacagcgtcgtcatgaccactaacaccagtaaaaaccacaggtgacttattaattcccaggccaacgtattatatttgtcatacaaactcagcccaggccaactttccgcttttcctttgacatattgcagcataataaattgcggtaatgtcagtagggggatggctgttaacatcgggatacctacacgttcgacacgtactttccaccattttttcaagggatagcgtaaaaaaagcatgtaggaaaagtagccggatataacgaaaaatacctgcatgcggaagctgtggatgaagtcattaaaaagggtcagccacaaactactttcggcgctattcacatgccatgtatggctgctatagattaaagaaatatgaaaaggtatccctaacaacatcagccaggcgcggatggagtcgaggaaatattcacgttgcgcgggtactgggttcatatatggttaactaatctcggatttttcgtcttatccctgtcgggttatgcctttaggcttgttgccatagtgacaccgacctgaccgcgccaggcgcaggcttcaaggtttttatgcatagcatcatcgctaccactaaccagaatggaagcgtctgtaagacggttgataaataaatttgctggcaaaccctacacgaagtcgatgcttctgtctttaggagaagcacggaaagtgaaaacggttgcaatcaggtgcttaatccatgagccagcgtgctgaacgataccgggattctgttgtcggaatggctggttatccattaaaatagatcggatcgatataagcacacaaagggggaagtgcttactaattatgaaacataaactacaaatgatgaaaatgcgttggttgagtgctgcagtaatgttaaccctgtatacatctagtagctgggctttcagtattgatgatgtcgcaaagcaagctcaatctttagccgggaaaggctacgagacgcccaaaagcaacttgccctccgttttccgcgatatgaaatacgcggactatcagcagatccagtttaatcatgacaaagcgtactggaacaatctgaagaccccattcaaactcgagttctaccatcagggtatgtacttcgataccccggtcaaaataaatgaagtgactgccaccgcagtcaaacgaatcaaatacagcccggattatttcactttcggcgatgttcagcatgacaaagatacggtaaaagaccttggctttgccggttttaaagtgctttacccgatcaacagcaaagataaaaacgatgaaatcgtcagcatgctcggggccagctatttccgcgtgattggtgcaggtcaggtttatggcctttctgcccgcggcctggcaattgataccgccttgccaagcggtgaagaatttccgcgcttcaaagagttctggatcgagcgtccaaaaccgactgataaacgtttaaccatctatgcattgcttgacagcccgcgtgcgacaggtgcttacaaattcgtggttatgccagggcgtgacacggttgtggatgtgcagagcaaaatctatctgcgcgataaagtcggcaaactgggggttgcaccgttaaccagtatgttcctgtttgggccgaaccaaccgagccctgcaaataactatcgtccggagttgcacgactctaacggtctctctatccatgccggtaatggcgaatggatctggcgtccgttgaataacccgaaacatttagcggtcagcagcttctccatggaaaacccgcaaggctttggtctgttgcagcgcggtcgtgatttctcccgctttgaagatctcgatgatcgttacgatctccgtccaagcgcatgggtgactccgaaaggggagtggggtaaaggcagcgttgagctggtggaaattccaaccaacgatgaaaccaacgataacatcgtcgcttactggacgccggatcagctgccggagccgggtaaagagatgaactttaaatacaccatcaccttcagccgtgatgaagacaaactgcatgcgccagataacgcatgggtgcaacaaacgcgtcgtagtacgggggatgtgaagcagagcaacctgattcgccagcctgacggtactatcgcctttgtggtcgattttaccggcgcagagatgaaaaaactgccagaggataccccggtcacagcgcaaaccagcattggtgataatggtgagatagttgaaagcacggtgcgctataacccggttaccaaaggctggcgtctggtgatgcgtgtgaaagtgaaagatgccaagaaaaccactgaaatgcgtgctgcgctggtgaatgccgatcagacgttgagtgaaacctggagctaccagttacctgccaatgaataagacaactgagtacattgccgaagactgatatccgcgccgttcatcaggcgctggatgccgaacaccgcacctgggcgcgggaggatgattccccgcaaggctcggtaaaggcgcgtctggaacaagcctggccagattcacttgctgatggacagttaattaaagacgacgaagggcgcgatcagctgaaggcgatgccagaagcaaaacgctcctcgatgtttcccgacccgtggcgtaccaacccggtaggccgtttctgggatcgcctgcgtggacgcgatgtcacgccgcgctatctggctcgtttgaccaaagaagagcaggagagcgagcaaaagtggcgtaccgtcggtaccatccgccgttacattctgttgatcctgacgctcgcgcaaactgtcgtcgcgacctggtatatgaagaccattcttccttatcagggttgggcgctgattaatcctatggatatggttggtcaggatttgtgggtttcctttatgcagcttctgccttatatgctgcaaaccggtatcctgatcctctttgcggtactgttctgttgggtgtccgccggattctggacggcgttaatgggcttcctgcaactgcttattggtcgcgataaatacagtatatctgcgtcaacagttggcgatgaaccattaaacccggagcatcgcacggcgttgatcatgcctatctgtaacgaagacgtgaaccgtgtttttgctggcctgcgtgcaacgtgggaatcagtaaaagccaccgggaatgccaaacactttgatgtctacattcttagtgacagttataacccggatatctgcgtcgcagagcaaaaagcctggatggagcttatcgctgaagtcggtggcgaaggtcagattttctatcgccgccgccgtcgccgcgtgaagcgtaaaagcggtaatatcgatgacttctgccgtcgctggggcagccagtacagctacatggtggtgctggatgctgactcggtaatgaccggtgattgtttgtgcgggctggtgcgcctgatggaagccaacccgaacgccgggatcattcagtcgtcgccgaaagcgtccggtatggatacgctgtatgcgcgctgtcagcagttcgcgacccgcgtgtatgggccactgtttacagccggtttgcacttctggcaacttggcgagtcgcactactggggacataacgcgattatccgcgtgaaaccgtttatcgagcactgcgcactggctccgctgccgggcgaaggttcctttgccggttcaatcctgtcacatgacttcgtggaagcggcgttgatgcgccgtgcaggttggggggtctggattgcttacgatctcccgggttcttatgaagaattgccgcctaacttgcttgatgagctaaaacgtgaccgccgatggtgccacggtaacctgatgaacttccgtctgttcctggtgaagggtatgcacccggttcaccgtgcggtgttcctgacgggcgtgatgtcttatctctccgctccgctgtggtttatgttcctcgcgctctctactgcattgcaggtagtgcatgcgttgaccgaaccgcaatacttcctgcaaccacggcagttgttcccagtgtggccgcagtggcgtcctgagctggcgattgcactttttgcttcgaccatggtgctgttgttcctgccgaagttattgagcattttgcttatctggtgcaaaggaacgaaagaatacggcggcttctggcgcgttacattatcgttgctgctggaagtgcttttttccgtgctgctggctccggtacgcatgctgttccatacggtcttcgttgtcagcgcgttccttggctgggaagtggtgtggaattcaccgcagcgtgatgatgactccacttcctggggtgaagcgttcaaacgccacggctcacagctgctgttagggttagtgtgggctgttgggatggcgtggctggatctgcgtttcctgttctggctggcaccgattgtcttctcgttgatcctgtcaccgtttgtttcggtgatttccagccgtgccaccgttggtctgcgcaccaaacgctggaaactgttcctgatcccggaagagtattcgccgccgcaggtgctggttgataccgatcggttccttgagatgaatcgtcaacgctcccttgatgatggctttatgcacgcagtgtttaacccgtcatttaacgctctggcaaccgcaatggcgaccgcgcgtcaccgcgccagtaaggtgctggaaatcgcccgtgaccgccacgttgaacaggcgctgaacgagacgccagagaagctgaatcgcgatcgtcgcctggtgctgctaagcgatccggtgacgatggcccgtctgcatttccgtgtctggaattccccggagagatattcttcatgggtgagttattacgaagggataaagctcaatccactggcattgcgtaaaccggatgcggcttcgcaataaaaacgtagttgcctgatgcgctacgcttatcaggcctacatcgttcctgcaatttattgattttgcaagactttgtgggtcggataaggcgttcacgccgcatccggcaaaaacaacgagccaataaaaataccggcgttatgccggtatttttttacgaaagaggtatcaaatgcgtttaattgtggtgagcatcatggtgaccttgctgagtggctgtggcagcattattagtcgcactataccggggcaggggcatggcaaccaatattatcccggtgtgcaatgggatgtgcgtgactccgcctggcgttatgtcacgatccttgatctgccattctctctggtttttgatactttactgctgccgatcgacattcatcatggcccgtatgagtgattaacgttcatcccactcatcagctgctgcgcgtccttcctcggtatccagcggtggctcaagctgaaattccccctcgtcccattcatgtaatgtattctcttcctgccactcctggcgtatctctatctcatcatagtcgccatcaaaaacactttgcgcggcttcaccgctaagcataggtaaacattcaccttcttccccttcgtcggcaaaaaactcaacttgccacatgatgtcgccgtcctgcaaaacgtatttttgggcattgaactgttgcacattcgcatcttcggcgtcgatgccggggttgtctgcaagaaattcttcgcgtgcagcgtcaatggcttcttcaagcgttgcgtacatggtcatcacgattctccctttgagttgatgaggtttcagggaaaaggatagctgattctccgcttttgcaagtatgaaaggcgaaaaatcagttgcttacctggggtattcgacgacgacgtagactgttccaactatagactgcgttgaataacactacgccagcggtgacgagaaataccgctctgaaaccgtagttcgcactaatcgctgctcccatcaatggtccggtaacgttgccaatatcacgaaagctttggttatagctgaagatacgcccggcgatctggttgctgctgttgtaaaccaacagtgtctgtacggcggggagtagtgcaccatcggcggcaccgagcaaaaaacgtaaaatcccaagttgcaatggcgtctgaacgtaagacattgggatcaacagcagtacagaaaagatcagcgctgtaatcaggatcttttcgggtccgattcgatcgccaagtttgccgagtcgtggtgcacttagcagagccgccacgcctggcacgctggcgatcatgccactgataaaggcgacgttactgacgttacccgccagttcgcggacatacagcgtcagaatgggggcaatactgcccgtcgccacctggatgattaacgtagtgacaaacaggctgagtaccagtttcgggtttttaagacttgtcaccacttcccgcatgtgcagcatctcttttttgctgaccggctggaatttttctctgatgcaaaacagggtgacgaaaaagcagagtatgagcacactggcggtaataaagaataccggacgtaagccgtagctatcggcgagcaggccgccagccattgggccgagcaacgcaccactaacgccgcctgtggagagcgtacccagcgcccagccgcttttattacgcggtacttgtgtggcgataagagcattagcgttggggacaaatccgccaagtaacccaagaagcgcccgcaggatcaaaaactgccagatattttgtgccagccccatcaacaccatcacgatgcccatgccgagggcagagcgtaatagcatgagttttcggcctttacggtcggcgagtccaccccaaaacggactggcgatggcgctaaataaaaatgtaatgctgaagacaataccggaccacatattcagggcggagtgaccggtaacgccaagctgctcaacgtagaggggtaagaagggcattaccagactgaaggcggcaccggtaagaaaacagcctagccaggcgacgatcaggtttcgtttccagtttataggggtgtcattttcacagggactcatagcaatccgctgttggtgcgccaggcgcggtgaacataagaagaaaagataagcacactaattatgcgcccgacttccagggggcgcaatccagagagcttttatcgctaaatcagggggatttgctgtggtaatgccggatgccattctgaagcatccggcatgggagatttaatagcgactaggaacgccttccgggcgtgttttaaagcgacggtgtaaccacatatactgctctggtgccatcatgatgcatttttcgaccactttgttcatccacgcggcggtagtttcggcatcatccagtggcggagaacactctggcggcagcataatcaattgataccctttgccatctggcttacggcgtggaacgaagggcaccagacatgcgccggacatccgtgccagcatccaggttccggtcgtggtcgcagcctgctcaacggcaaacaacgggacgaaaacgctactgcgcgggccgtaatcatgatccggtgcgtaccagaccacttcgccttttttcagggctttaatcatgccttttaaatctttgcggtcgagcatgcttttattactgcgcaaacggccccaggtttgtagccagtcaatcagtggattatcgttcgggcgataaacgccaatacccggttcctgcataccaaactgccgcgcacccagctccagtgtcagaaaatggatgccaactaacaggatgccgcgtttttgcgcctgcacgtcacgaatgtgttccatgccgatcacttccgtccagcgggcgattcggcggtccggccagaaccacgccatgccggtttccatcaggcccatgccaacggattcgaaattcttcaccaccattttacggcgttcttgttcgctcatttccgggaagcacagttccaggttgcgatgcacaatttttgcgcgtcgtttcataaaacgtaacgccagttttcctaatccacaaccgaggcggtagataaccgggtagggcaattgcacgactaaccaaagtacgccaatacccaaccaggttaaccaataacgcggatgaagcagtgcggtggagaacttgggtagattcgtcatatcaatcctgtttttcaacctattcgggcaattgtatgtattgtcgcattttttcgcccgcaaccaaaatttgtggctgaagactgggcgaaattgccgcgcttgtaaataacaaataatttttaatgcgcaaatgtagcgtaaaatgtgtggatgttaattatcgataattgctatatcatgccgcggatttttactttcccatctcgcaggaaccgtacaccatgccagtgttacacaaccgcatttccaacgacgcgctaaaagccaaaatgttggctgagagcgaaccgcgaaccaccattagcttttacaagtatttccacatcgccgatcctaaggcgacccgtgacgctttatatcagctgtttaccgcgctgaatgtttttgggcgagtgtatctggcgcatgagggcattaacgcgcaaatcagcgtacctgcgagcaatgttgaaacatttcgcgcgcagctctatgccttcgacccggctttagagggtttacgcctgaatatcgcgttggatgatgacgggaaatccttctgggtactgcgcatgaaggtacgcgatcgcattgttgccgacggtattgacgatcctcactttgatgccagcaatgttggtgagtatctgcaagcggcggaagtgaacgccatgcttgacgatcccgatgcactatttatcgacatgcgtaaccactatgagtatgaagtggggcactttgaaaacgcgctcgaaattccggcagataccttccgtgagcagctgccaaaagcagtcgagatgatgcaggcacataaagataaaaaaatcgtcatgtactgcaccggcggcattcgttgtgaaaaggccagtgcctggatgaaacataacggattcaacaaagtctggcatatcgagggcggaattattgaatacgcccgtaaggcgcgcgagcagggcttgccggtgcgttttattggcaaaaattttgtttttgacgagcggatgggcgaacgtataagcgatgagattatcgcgcattgccaccagtgcggcgcgccgtgcgacagccataccaactgtaaaaatgatggctgccacctgctgtttattcagtgtccagtatgcgcggaaaaatacaaaggttgttgtagtgagatttgctgcgaagaaagcgcgttaccgccagaagaacagcgacgccgtcgggcaggacgtgaaaatggcaataagatctttaataagtctcgtggacgtctgaatacaacactgtgcattcctgatccaacagaataaatatcattgccggatgcgtgccatccggcaacatttcacgcttacttctgctgtacgccttccacactaataatcagatccacttcctgagaagctggacctaaatctgtcttgatattgaagtccttgagcttaattttgccttcggcctcgaagcctgcacgtttaccaccccatgggtcgtcgccctgaccaattaatttcgcttccagcgtgacgggtttggttacgccattcagcgtcagatcgccggtaatatccagttcgtcaccgtctttcttcacgctggtggaggtgaatgttgcctgtggatattttgcggtattgaggaaatctgcactgcgaagatgtttatcgcgttcggcgtgattagtatcgacgctggtggtgttaattgtcacattcactttatcggcagccggatttttttcgtcaaaggtaaaagtaccgtcgaaatctttaaaggtgccgtataaccagctatagccaaggtgctggatgcggaaattaacaaaggcgtgctgaccttctttgtcaattttgtaatcggcggcaaccgcactaccggcagagaacatcagggacgcgaaggttaaaccaagcaggctttttttcattttttatactccatagtcagaactgctctttcccagcatgcgcttcagagtgtcgtctttatcgatgaaatgatgcttcagggccataaatccgtgcataacggacagtactacgacgctccacgcgagccaaaaatgcagggcaccggcaaagtctgcctgtgcgccagcgtcggcaagggtcgcggggacgtcaaaccagccaaaaacgctgatcggtttaccatcggcagtactgatcagatagccgctgatgccgatggcgaaaagcaataggtacaatgcgagatgtccagctcttgcggcaagacgagtcatggggctataactcggcagcggacccggcggtggagatatgacacgccacagaacgcgaataaccagccccatcattaacaaaataccgatgcttttatgcagttcgggtgctttgtgataccagccatcgtaataactgagcgtgaccatccacagacctaaagcaaacatgccgtagacaataattgcgcttagccaatggaaggccgcagatataacaccatagcgttcaggggtatttgtgaaactcataagtgcatccaaaacgaatttgcgagagaaagaaaatggcgtgtcggagaatgaattgcaacacaaaaataacaaattgaatgatatttatttttatttcaataattttgaattaataatgaaagaatcttcataagtttagtgggttcagcatcagagatgtctggtgagtgctgtagaagcaggaataatctcattcaatttttcacgctaaatgaaagggagattaaatatttgtcagtttatgtcagtgcggaaaattaaaaataaaacacatagatcagatccataattgccaacaatccccagagaaaaagataaagcatcagatgctcgcgaatattattgatgagatagtgcaacagccgacgcattaaatactcctgtaaaaacggcctcattctggaggccgtaatgatgattattggaagcgggaaagcctgaatggcgtcaaatcaaaatcgctttttttgtcttgcgcaaaatcggcagctatttcccctaaaacactcgcaaatttaaaaccgtgcccactcaggccggtaatgagcagtgtattatcgtggccgggtagggtatcgataataaaatcttcgtcagggctattatcataggtgcaggcagcgccgtacaggcagcaaccgatacccggcaatacattgcgcaagaacgggaaggcttcactcccatcactggccacttccgcaaacggaacacgttcatccgcactatggataacctggcctccgttatgtttgccaatcttcaacgcgtcgttttctgccggaaaaccataatattgatcgccattgggcagttcaccggtaaacgccgggaatttattcttcacgctatagcggccatcggcctgataccaggcaaatactttgcgtacgggctggacaggcagctccgggagcaggtcttttacccatgttcccgcgcagacaatcgcttttttcgcctgatactcaccgtcagccgtttcaatagttacgccatcatcgtcatgacgaattgcggtgaccgggcagttgaacagttgcgcacagcccgcttccttcgccagttggatccaggttttaatcgccagttcgctgcgcaaaaaaccggaatcagtttcaaataagccgatgtagttgtccgggacgcgtatttccggccagcgggccataatcccttgcgcatcgagcttttcaacgttgagttgccattgttcggcgctgtgggcgacgttggcgagaaatgtggaatcagccgggccaaggttaatgacgccagagcgtacaaaaatgggatcttcttcgttgtggcgggagagttcatcccacagcgtttgcgcgcggaggaccagcgggacatacttttcgccttcaccataagcatggcgaattaatcgcgtatcgccgtggtggctgccgtgttgatgcggtggcatatgggcgtcggtcattagcacgtttaaaccggcgcgggttgcataatacccggcggcagcgcctacggaaccgctgccaataatgatgagatcgtatttcatttttttctctctgctctcatggtttaagcagagtaattaactgaatgcagatatacaacccagaaatggtaaaggcaccggtgaggtgccttttgggtggatggtcatgtcatgttaatgacgccgatactcgtttacctggaaatcaccggattcaattttggcgattcctgcttctaatatgctaataaattgtctggcaacatcagtggttaaccagagcgtctgaccaacttcagtcccttcctgctcggacttatttggggtctggtagtgcaaacgcaacatcagcgcatcatagctatcaacggtgctgatgtcccaccctacgagcggatgagtctgaatgacttcattatttttttccatcatggccccctaattcgtgttactagacaacgttattcgaggttcaatgcgtttttatctgaagcaacttcagtataccaataagtaagggtattcaccgaatttttaaagggggaaacagataaatttctgcttttaagatttatatgaacaataaaacagcatgtcattcatatttttttagcatattgtgcaattattttgaggaagtgtagaaattttgtactcaaaattcgtaagtaaaataaaaaagccggggcgacccggcaaaaaaaatcactgcatattattcgctgacaaaccagtcatcggcgctttcccacgtttcctggagaatttcactaatgcgctgtttatcttcttttgtcgcgccaataacgcttaaattattcgctgcggcataacgtacgcttacgtggccttcattatcaggaaacgcatactgaatacggcgggaaagttcgccagccagggcgtcaatagccccagctggcaatggagaagttttcgctatggtgacttcaattcgcataatagccccctgttgaatatactggttatttatacaggtaaaataacctaatgacaacaggaagctacgatttttattgtttaacggaccagcgtaccgtttccccggcgaggaatggcaccagcgtgtcatcagtcagtgcgatgctttcagcaacctgttgctcttcacgtaccagttcgatgaatgtgtcgttgaccggcaacccatagaactgcgggccgtttacagaacagaatgcttcaaagtgctgcaaagcattcatttcttcaaagacggtagcgtaactgcccagcgcggttggggcgttgaagcagcccgcgcagccgcaactgctctctttgcgatgacgtgcatgtggcgcagaatccgtaccgaggaatactcgattaaaaccgctggcgaccagttcacgcaatgcctgttggtgaatattacgtttgaggatgggtagacaatacaggtgcggacgcacgcctccaaccagcatatggttgcggttaaacatcagatgctgcggagtgatggtggcagccagccgttcatttccgtcacggacatagtcggcagcatctttggtggtgatgtgctcaaaaacgactttcagcgcagtcaggcgctggcgcagaggttccatcacgctttctataaagcgcgcttcacgatcaaaaatgtcgatatctgcatgtgtcacttcaccatgcaccagtagcggcataccgattttttccatgcgctcaagtaccggcatgattgcgtcaatactcgtcacgccgtggctggagttagtggttgcgtttgccgggtaaagttttgcagcggtgaacacgccttcgttaaatccgcgctccagctcattaggatccaggctatctgttaaataacaggtcatcaatggggtgaaatcgtgcccggcaggtacggcgtcaagaatacgctggcgatacgccacggcagcctcaacggtggtcacgggcggagccagattgggcattacgatagcccgtccataaatttcgctggtatatggcacgacagtttttaacatgtcgccatcgcggaggtgaaggtgccagtcgtctgggcggcggatctttaatacctgggatggtgcagtcattaatctctatgctccggctgaagggatgtttttgccggacacaaaggataagcggaaacgttttcctttgcacgaaaaataaagggcgcgaatgcgccctcgtgattaatcagtaaatggaatgacaatttcgcctggcttcacttcaatgcctttcgccagttttttcgccattgcttcgccctggctgccatcttcgcgcaggacgtaagcaggttgctggttaaagtaattgcgtaatgcctggttcaaatagggaagcaacgtttgcatcaccgtttgcattttttccggttgtaccgtcgcatcgaccacttccatctctttcaggaagatcgcacctttttctttatcaaacacgggcagcgctttcagcttcagtttcatggtcgctttctgactaccgaacagggagttcatgtccagattggcgtctccggttagggtaaccttattcggctcttcgcgaccaatttggctggtcaggtttgtcagaacaatatgggcgtcagccacgccgggtaaaccgatatctttactgaaattattatgtttcgcaaggctctggttaatttcttgttcggtgatggtgtattgggtgagttgattacagccaacgagcaggccactgacgatcaatgcagcggcaaataaaaacttgttcatggtagtcctcgacatgaaatctgcgtcaatatcctgacacaacgcagcatgtgtcaccagcgataaactcgccagcagaaaaaactgaaaacggcggcaacccgcgaatacaggctgccgcggcgggtcaggattaaatcgccatactacttaacaaattgatttgtgtctgtttcgccatattatcgcggtaatcagcaacgcggcttggccagttaattccggctaccagcgtcagattacgcagtagcgggaatagctgaatatcatcttcgctaagttcgccattcacggcgttcggtttgacgatcagtttgtccagcgcacgtaaatcatcgctgatattcttaatcagaccgtcagagtgggccagcaggtcggcaaaattacccgcgctggcctctttcttgtcgacgaaatatttgcgcgcggcgggagtagaaaactcatcaaatgcgcttttggcaaaacgcggcaacagcagtttgttggcgtagccattgaccttgcgcagccactcttcaatggcaggggaacgtttgccggtcagtaacggtttgccgtcgagtttatcgacatagtgaacgatgtccatgctttctggcatatagcggctgtcatctttttgcagaatgggaacctgtttttgaccgaccatccgggtgggtgtttctgcgtcgtcgttgagcagaacatgtaattcgacggggatatttttcaggccgaaaatcatgcgggctttgaggcagtaagggcagtgatcgtaaatgtatagcttcacgtgactcctccatttggctgtcagttcactttcagtatgaaggagtcaggggggagtatcaaatcaggcgtcgcgttcaagcaaacgacgcgcggcgcgtttctggctaaactgccaacccagcgcaaggaaagtgaagatgccaataatgcccagcatcatccacggaagctctggctggtgcgcgcttttgcccaggtcaaacagccagccgccaccgatataaccaatagcgccgccaatcgccagacccagacggctaaaccccatatagctgccgcgagctcttgcgtccgccaggctagcacttaaggtttcacgcgcaggctcggcaatgatgctcccgatataaaacagacaaatcagggtgaaaagttgttgcaggccgctgaccatgcccaccggcatcatgcttaaactcattatcaacagcccagccatcaaccggtgttccagacgaaaatgcttttcactccagcgggcgatagggtagagcaacgttaagctcagacacgcttcaatggcatacatccatttaacggcagagggcgcgccagccacgtcgttgaccataattggcagcatcagcatcacttgtacagccagcatgtagtaacccgccagcgtcagaacataggtgacaaaacgcttgtcacgcatcacgcgggtcatgccttcgcgaacgggcgtgcgtacggtggagagtttccatgctggtaacaaccacgcattgaacgccgcacatagcacaaatagaactgcccctgtggcgcagaccaggcgaaagtcgtattgcaacagccagctccccaacaatgcgccaatgaccgcaccggcactgtcctgcatcatcaacaggctgaaaaaacgaccacgctgctgtggacggattaatttcaccaccagcgcgctacgcggcggatcaaacaacgtgccaccgagtccgctgagcaggcaactaaaccacaatagccacggttcgtgggcgatacccattgtggcgaatccggcggcgcgcatcagcataccggtaacaatcatcggtttggcaccaaagcggtcggcaattgcaccgccgaaaatacccagaccttgctgaataaattggcgtagaccgagagcaataccgaccatgacggcggcccagcccatttgatcaacgaagcggatagagatcagcgggaagacaacaaagaaccccagcacgaccagcatattatcgatgagcaggaaatatttacccaggttcctcgcctggctcacgcgggacatttcccctcccgggaaataaaagatgagcactttctattctgcattgccgctaagacttttcccatcacttcggggacaatatttttttatcaaaacgtcgctttgatagagagtttttatcaaatatgtgaataatgcagaaaatggcattttggacttttcacagggtctggttgcgcaggtatagtaatacttacagcgtattaaagacgttacgggaaggagtaggtatagaatgtttggctatcgcagtaacgtgccaaaagtgcgcttaaccacagaccgactggtcgtgcgtctggtgcatgatcgtgatgcctggcgtcttgcggattattacgcagagaatcgccatttcctcaagccctgggagccagtgcgcgacgaaagccactgttatccaagtggctggcaggccaggctggggatgattaacgaatttcataaacaaggtagtgctttctactttggcttattcgacccggacgaaaaagagattattggcgttgccaatttttccaatgttgttcgtggctcttttcatgcctgctatctcggttatagcattgggcaaaaatggcagggcaaaggactcatgtttgaagccctgaccgcagccattcgttatatgcagcgcacccaacatattcatcgcattatggctaattatatgccgcacaataaacgcagcggtgatttactggcgcgactgggttttgaaaaagaaggctatgcgaaagactatctgttgattgatggacaatggcgcgatcacgtactgacggcattaactaccccagactggacgcccggccgctaaggagaatctcatgaaatatcaacttactgcccttgaagctcgcgtgattggttgcttgctggaaaagcaggtgaccacgccggagcaatacccgctcagtgtcaatggtgtagtcacggcctgtaatcagaaaacgaaccgtgaaccggtcatgaatctgagtgaatccgaagtgcaggaacagctggataatctggtcaaacgtcattatctacgcacagtgagcggttttggtaatcgggtcaccaaatatgagcaacgtttttgtaatagtgaatttggcgatctgaaactgagcgcagcggaagtggcgttaatcaccacgttgttattgcgtggtgcccagacgccaggtgaactgcgcagccgcgccgcgcgaatgtatgaattcagcgatatggcggaagtggagagcacgctggaacaactggcaaatcgcgaagatggtccttttgtggtgcgtctggcccgcgaaccgggtaaacgcgaaaaccgctacatgcatcttttcagtggtgaggttgaagatcagccggcggtgacggatatgagcaacgcggttgacggtgatttacaggcccgcgtcgaagccctggaaatcgaagtggcagaactgaaacagcgtcttgatagcttgctggcccatctgggagattaaagtgaaaaaattacgtatcggcgtagtgggattaggtggcattgcgcaaaaagcgtggttaccggtgctggcggcagcgtctgactggacgttacaaggagcctggagccctacgcgcgcgaaagccctgccaatttgtgaaagctggcgcattccttatgccgatagcttatccagccttgccgccagttgcgatgcggtttttgtgcattccagcaccgccagccactttgacgtggtcagtacgttactcaatgcgggggtacatgtctgtgtcgataaaccgctggcagaaaatctgcgcgatgctgaacggctggtggaactggcggcgcggaaaaaactgacgttgatggtcggttttaaccgtcgtttcgcaccactctacggtgagttaaaaacgcaactcgccaccgcagccagcctaagaatggataaacatcgtagcaatagcgtcgggccacacgatctttatttcacgttgctggatgattatctgcatgtggtggataccgcgctgtggttgagcggcggcaaagcctctctggatggcggtacgctactgactaacgacgctggcgaaatgctgtttgccgagcaccattttagcgctggtcctttgcagatcaccacctgtatgcatcgccgtgccggaagtcagcgtgaaaccgtgcaggccgtgactgacggtgcgctcatcgacattacggatatgcgcgaatggcgtgaggagcgcgggcagggcgtagtgcataaaccgattcctggttggcagagtacgcttgagcaacgtgggtttgtcggctgtgcgcggcacttcattgaatgtgtgcaaaaccagacagttccgcaaaccgccggcgaacaggccgtgctggcgcaacgtatcgttgacaagatctggcgcgatgcgatgagtgaataaaccctgtaacatctggcggtagcaattcaccataatccaggtagactattcgcctctttcagcgcctgccttgcaggcgttttgcccgtgggtctggattagaacaccgatgaatttattaaaaagcctggccgccgtcagcagcatgaccatgtttagccgtgtgcttggcttcgcacgagacgcaattgtcgccagaatctttggcgcagggatggcaaccgacgcctttttcgtcgcttttaaacttcctaacttgttacgccgtatctttgccgaaggggcattttcccaggcatttgtaccgattctggcggaatataaaagtaagcagggtgaagacgccacgcgggtctttgtctcttatgtttctggcctgctgacacttgcgctggcggttgtgacggtcgctggcatgctcgccgcaccgtgggtgatcatggtgaccgcgccaggcttcgctgacacagctgacaaatttgccctgaccagccagctactaaagattacctttccctatatcttgctgatctccctggcgagcctggtgggagcgattctgaatacgtggaaccgcttcagcattccggcgtttgctccaacactgcttaacatcagcatgattggtttcgcgctgtttgccgcaccgtactttaacccaccggtgctggcgctggcgtgggctgttacggtcggcggcgtcctgcagctggtgtatcagctaccgcacctgaagaagatcggcatgctggtcctgccgcgcattaacttccacgatgccggagcaatgcgcgtggtgaaacagatgggaccggcgatccttggcgtctctgtgagccagatctccttaatcatcaacaccatttttgccagctttcttgcttccggtagcgtgtcttggatgtattacgccgaccgcttaatggagtttccgtccggtgtgctgggcgtggcgcttggcaccattttgctgccgagcctgagcaaaagttttgccagtggcaatcatgatgaatacaaccgtttgatggactgggggttgcgtctttgtttcctgttggcgctgccgagtgcggttgcgttgggcattctttccggtccgttgaccgttagcctgttccagtacggtaaatttaccgcgtttgatgcgctgatgacccagcgggcgttaattgcctacagcgtgggtttgattggcctgattgtagtgaaagtgttggctcctggcttttattcccgccaggacattaaaacgccagtgaaaattgccatcgttacgctgattttaacgcaattgatgaacctggcgtttattggtccgttgaaacatgccgggctgagtctttctattggtctggcggcgtgtctgaatgctagcctgctttactggcagttgcgtaagcagaaaatctttaccccgcaacccggctggatggcgtttctgttgcgtctggtggtggcggtactggtgatgtctggcgtgcttttaggtatgttacatatcatgccggagtggagtttgggtaccatgccctggcgtttactgcgtttaatggcggtcgtgctggcggggattgccgcgtacttcgctgcactggcggtactgggcttcaaagttaaagaatttgcccgccggacggtgtaacaatgcattccggcctgcagtgttcgctttaaaacatatcatgaaactgggtatgttttgtctgcctgctctgggatcgctggggcgggcatttttttgcctattttgcattgttggttagcaaggatgccattcgatgaattttaatatgttgattcaaagatgaaataaaaaagccctggcagttaccagggcttgattactttgagctaattattactcaacaggttgcggacgcgcaggagcggcagaggcatgatgtgttgccgtatgaccacctgcggcacctttaccttcgaaggcaaaagtagggcgctgccagtcactgtgacgcggtgcctccggaacatattccggtgctggagcgcgcgtcattggcgcggtagcgtggttatgctcaacggtgacctcaggttcgaccgcagctaccgtttcaacttctgctgcgacttcagcgactactggcgcggcaggttgagcaacaacttcaggttcagcaactacaacctcagcagtttcgacaacttcttcaatatctgccgtctcttcctgcggttcaaccaccggttctgcttgttctgcaacttcctgggctacggcaacatcagactcggtaatcacctgcggctgttcagttaccgcggcagcgatcacttcaggatgcgtcgtttcaaccacttccggttgcggttcggcaacctgaacgggggcttctacgacaccggccacttcttcaacaactggcgcgctaacaaccggttcgatagcggcggcgacagggacctcagtcaccatcggctgcacatgtacttcttcctgttcgcgctgctcttcaacctgtacatcttgcggacgtacaattggatagcggatccagactttgccagaggccagttccggagacgcgcacgctacggtcaacggcattgggctctgggttggataacgctcgtcacgatagcgacgacgacgctgaccacttacgcgcaggtgacgagggctgcggcgagaacgacgcggcatgccaccgttgtcacggttatcagcattgttctcttcttgctgttctggtgcagtttgcgctacgactggcagcgggactttcaccagttctgtgcgtggagctggcgcttcctgaacaattggttcggcagcgacagtttcttcaaccaccggtgcgactaccgcttcttcggctacgctttgctcgtaacgcactttctgattgagctgacgctgtttacgacgcggctgaaccggacgtacacgttcttcctgttcggtttcctgaacagattgctcttcaacattcagcgccttcgcttcttgttgcgcctgacgtttatcatcattacggcggcggctacgttcacgacgcggcgcttgctgctcgtcggcggtacgcgctttttccgttacctcagcctgctgacggctctcacgcgtctcggcagtctgctgctgtgcctggcgacgattacgacggttttcttcgcgattatcgctgccttcagtacgttcactacgggtgtcgcggcgctcattacggtcacggcggttgttctgacgaggcttgcgacgatcctgttgacgttccggtttcgcttctgctttcggtgctggttgctcggtcggtttggtttcttcaccaccgctgaacagcgctttcagtgcgccgaagaagcggctcaacagcccaggttgtgcaggagctgctggtgttgccggtgcagctttcggtgctggagctacaacaggcgcggcaggttcagctggcgttggcgcaggcggcacatccggcatggcaaaggttgccagcgcaggttgttccggacgcttacgttcagcgaactcttcttcagacggcagcgccatcgcttcttcatgcagcttcggcagcatgtagcttaaggttggggtttcttcccctttacgcacgcgcagcacgtggtagtgcggggtttccatctgatcgtttggcacaattacacagcgcacaccgtcctgacgagtttcaatggcatttaccgcagaacgtttttcattcagcaggtaagaagcgattggcacaggaacaatggcgtgaacttcctgggtgttctctttcagcgcttcttcttcgatcagacgcagaatagagaggctcaggctttcgttgtcacgcacggtgccagtaccagaacaacgcggacaaacgtgatgactggattcacccagacttgggctcaggcgctgacgggacatttccagcaggccaaagcgagaaatatggctgatttgaatacgcgcacggtcctgacgcaccgcttcacgcagacggttttctaccgcacgctggtggcgtactggcgtcatgtcgatgaagtcgataacaatcaggccgccgaggtcacgcaggcgcagctgacgagcaatctcatcggcagcttcgaggttagtgttaaacgcggtttcttcgatatcgccgccgcgggtcgcgcgtgcggagttgatgtcgatggccgttaacgcttcggtgctgtcgataacaatggaaccaccagacggcagacgaacttcacgctggaaggcggactcgatctgactctcgatctggtagtggctgaacagcgggatctcgccggtgtacagtttgattttgctgctgaaatccgggcgacctaatgcagcgatatgctgacgtgccagttcgagcactttcgggttatcgataaggatttcgccgatgtcctgacgtaagtaatcgcggaatgcgcgaacgattacgttgctctcctgatgaatcaggaacggggccgggcggctttcagcggcttttttgatggcttcccagtgtttcagacggaagcttaaatcccattgcagcgcctcagcagatttgccgacgccagcggtgcgcacgataagccccatgccttccggcagttcaaggcttgccagtgcttcttttaattcggtacggtcgtcgccttcgatacggcgagaaatgccacccgcgcgcgggttgttcggcatcagaaccagatagctacccgccagactgataaaggtggttaatgccgcgcctttgttgccgcgctcttctttatcgatctgaacaatgacttcctgaccttcacgcaacacatctttaatgttgggacgaccatgagcactgtagttagcagggaaatattcgcgggcaatttcttttagtgggaggaaaccgtgacgttcagcgccgtaatcaacaaaagcagcttccagactcggttcaatgcgggtgattttacctttgtagatgtttgcctttttctgctcgtgccctggactttcgatatccaggtcatacagacgctgcccatctacaagggcaacgcgcaactcttcctgctgagttgcgttgattaacattcttttcatcgtaacttactcattattcttacattgacgactaagctgcgggcaaagtaacgcctttccgggtgtgaaccgatggcctcgtgtctagtcgcgtcgccaacctcacggttatcgtcagctcaaagaggcgcagagtgtgagttgcccgtttttcatgcggaaaaacagcgcaattatcaaagaaacagactgggtattactctccagaaatatttccatctaccggtaaggactgcaacccgcagcccgctaactgcctgaaagatcaatacgtcttacgccattgctgcgtggatgatcggtcgggcaaaatgggttattccgtaaaatttcttgttttaacaaggatggacacggaaacggcctcattattccactgcaagccttgttatagcaagatgacttttaccatttatcacccgcttactcacagttttttcacttcttgctggtgattggtttaataaccatcaataaagtgatcacgcagtgaagtaataaggtgcaaaagtaaatataagcatagaaaaatgagtggcgcgaatcctgttggctaattagaatcgccaaccatgaaaacagagactccatccgtaaaaattgttgctatcaccgctgacgaagcggggcaacgtatcgataactttttgcgtacccaattgaaaggcgtaccaaaaagtatgatttaccgtattttgcgtaaaggcgaagtgcgggtgaacaaaaaacgtattaagcctgaatataaactcgaagcgggtgatgaggtgcgtattccaccggttcgcgttgctgagcgggaagaagaggcggttagcccacatctgcaaaaggtggcggcgctggcggacgtcatcttatatgaagatgatcacatcctggtgctgaataaaccttccggtacggcggtacatggcggcagtggtttaagcttcggcgttattgaaggtttgcgggcgttgcgcccggaagcgcggttccttgaactggttcatcgtcttgaccgggacaccagtggtgttttgctggtagcgaaaaaacgcagcgcgttgcgttctctgcatgagcaattacgtgaaaaagggatgcaaaaagattacctggcgctggtgcgcggtcagtggcagagccatgtgaagagcgttcaagcaccgttactgaaaaatattctgcaaagcggcgaacgtatcgtgcgtgtgagtcaggaaggcaaaccgagcgaaacacgctttaaagtggaagaacgctatgcatttgccaccctggtgcgttgtagcccggtaacagggcgtactcaccagatccgtgtgcatacacaatatgcgggtcatccgattgcctttgacgatcgctacggtgaccgtgaatttgacaggcagctcactgaagcaggcacgggattaaatcgcctgttcctgcacgctgcagcgttgaagtttactcatccggggaccggtgaggtgatgcgtatcgaagctccgatggatgaaggtttgaagcgttgtttgcaaaagctgcgtaacgcgcgctaatacaagcatataaacctgataatgggcggttggcctgataaggcgtttacgccgcatcaggccgccagcaccgattgccggatgcgacgtaaccacatccggcgcaaaaaattatcccatcagcgggtttttcccttcccgacgtaacatctgacacagcgcgattagcggtaaaccaaccagcgtgttaggatcacgcccctctaaacgctcaaacagcgtaatgccaaatccttcactcttaaagctacccgcgcagtgcaggggatgctctttacgcacgtaattatcaatctccgcctcgctcaggtgacggaaatggacgtcaaaaggctccacttctgtttgcagatgcccattcgcgctattaaacaacgccagtccagtatagaaggtgacgatattgccgctggctttgcgtaattgcagacgggcattttcttccgttaacggtttaccggtgatttcgccatcaagaacacatacctggtcactaccaataattaaatgatccggataacgactcgccagagattgcgctttttcttgtgccagtcgaagcaccaactgtcgcggactttcgtcgctgcgtggggtttcgtcgacctctggtgctgcacattcaaaagagatttgcagtttttccagaagagcgcgacgccatgggctggtggaggctaaaataagtttaggcatatttttttccatcagatatagcgtattgatgatagccattttaaactatgcgcttcgttttgcaggttgatgtttgttatcagcactgaacgaaaataaagcagtaacccgcaatgtgtgcgaattattggcaaaaggcaaccacaggctgcctttttctttgactctatgacgttacaaagttaatatgcgcgccctatgcaaaaggtaaaattacccctgactctcgatccggttcgtacggctcaaaaacgccttgattaccagggtatctatacccctgatcaggttgagcgcgtcgccgaatccgtagtcagtgtggacagtgatgtggaatgctccatgagcttcgctatcgataaccaacgtctcgcagtgttaaacggcgatgcgaaggtgacggtaacgctcgagtgtcagcgttgcgggaagccgtttactcatcaggtctacacaacgtattgttttagtcctgtgcgtagtgacgaacaggctgaagcactgccggaagcgtatgaaccgattgaggttaacgaattcggtgaaatcgatctgcttgcaatggttgaagatgaaatcatcctcgccttgccggtagttccggtgcatgattctgaacactgtgaagtgtccgaagcggacatggtctttggtgaactgcctgaagaagcgcaaaagccaaacccatttgccgtattagccagcttaaagcgtaagtaattggtgctccccgttggatcggggataaaccgtaattgaggagtaaggtccatggccgtacaacagaataaaccaacccgttccaaacgtggcatgcgtcgttcccatgacgcgctgaccgcagtcaccagcctgtctgtagacaaaacttctggtgaaaaacacctgcgtcaccacatcactgccgacggttactaccgcggccgcaaggtcatcgctaagtaatcacgcatctgcgtgatgaagcttagtgaggattttccccaggcaactggggaaagaccaaaccgggcggcgacgataccttgacacgtctaaccctggcgttagatgtcatgggaggggattttggcccttccgtgacagtgcctgcagcattgcaggcactgaattctaatagccaactcactcttcttttagtcggcaattccgacgccatcacgccattacttgctaaagctgactttgaacaacgtagccgtctgcagattattcctgcgcagagtgttatcgccagtgatgcccggcctagccaagctatccgcgccagtcgtgggagtagtatgcgcgtggccctggagctggtgaaagaaggtcgagcgcaagcctgtgtcagtgccggtaataccggggcgctgatggggctggcaaaattattactcaagcccctggaggggattgagcgtccggcgctggtgacggtattaccacatcagcaaaagggcaaaacggtggtccttgacttaggggccaacgtcgattgtgacagcacaatgctggtgcaatttgccattatgggcagtgttctggctgaagaggtggtggaaattcccaatcctcgcgtggcgttgctcaatattggtgaagaagaagtaaagggtctcgacagtattcgggatgccagtgcggtgcttaaaacaatcccttctatcaattatatcggctatcttgaagccaatgagttgttaactggcaagacagatgtgctggtttgtgacggctttacaggaaatgtcacattaaagacgatggaaggtgttgtcaggatgttcctttctctgctgaaatctcagggtgaagggaaaaaacggagctggtggctactgttattaaagcgttggctacaaaagagcctgacgaggcgattcagtcacctcaaccccgaccagtataacggcgcctgtctgttaggattgcgcggcacggtgataaaaagtcatggtgcagccaatcagcgagcttttgcggtcgcgattgaacaggcagtgcaggcggtgcagcgacaagttcctcagcgaattgccgctcgcctggaatctgtatacccagctggttttgagctgctggacggtggcaaaagcggaactctgcggtaacaggacgctgccagcgaactcgcagtttgcaagtgacggtatataaccgaaaagtgactgagcgtacatgtatacgaagattattggtactggcagctatctgcccgaacaagtgcggacaaacgccgatttggaaaaaatggtggacacctctgacgagtggattgtcactcgtaccggtatccgcgaacgccacattgccgcgccaaacgaaaccgttagtaccatgggctttgaagcggcgacacgcgcaattgagatggcgggcattgagaaagaccagattggcctgatcgttgtggcaacgacttctgctacgcacgctttcccgagcgcagcttgtcagattcaaagcatgttgggcattaaaggttgcccggcatttgacgttgcagcagcctgcgcaggtttcacctatgcattaagcgtagccgatcaatacgtgaaatctggggcggtgaagtatgctctggtcgtcggttccgatgtactggcgcgcacctgcgatccaaccgatcgtgggactattattatttttggcgatggcgcgggcgctgcggtgctggctgcctctgaagagccgggaatcatttccacccatctgcatgccgacggtagttatggtgaattgctgacgctgccaaacgccgaccgcgtgaatccagagaatagtattcatctgacgatggcgggcaacgaagtcttcaaggttgcggtaacggaactggcgcacatcgttgatgagacgctggcggcgaataatcttgaccgttctcaactggactggctggttccgcatcaggctaacctgcgtattatcagtgcaacggcgaaaaaactcggtatgtctatggataatgtcgtggtgacgctggatcgccacggtaatacctctgcggcctctgtcccgtgcgcgctggatgaagctgtacgcgacgggcgcattaagccggggcagttggttctgcttgaagcctttggcggtggattcacctggggctccgcgctggttcgtttctaagataaggattaaaacatgacgcaatttgcatttgtgttccctggacagggttctcaaaccgttggaatgctggctgatatggcggcgagctatccaattgtcgaagaaacgtttgctgaagcttctgcggcgctgggctacgacctgtgggcgctgacccagcaggggccagctgaagaactgaataaaacctggcaaactcagcctgcgctgttgactgcatctgttgcgctgtatcgcgtatggcagcagcagggcggtaaagcaccggcaatgatggccggtcacagcctgggggaatactccgcgctggtttgcgctggtgtgattgatttcgctgatgcggtgcgtctggttgagatgcgcggcaagttcatgcaagaagccgtaccggaaggcacgggcgctatggcggcaatcatcggtctggatgatgcgtctattgcgaaagcgtgtgaagaagctgcagaaggtcaggtcgtttctccggtaaactttaactctccgggacaggtggttattgccggtcataaagaagcggttgagcgtgctggcgctgcctgtaaagcggcgggcgcaaaacgcgcgctgccgttaccagtgagcgtaccgtctcactgtgcgctgatgaaaccagcagccgacaaactggcagtagaattagcgaaaatcacctttaacgcaccaacagttcctgttgtgaataacgttgatgtgaaatgcgaaaccaatggtgatgccatccgtgacgcactggtacgtcagttgtataacccggttcagtggacgaagtctgttgagtacatggcagcgcaaggcgtagaacatctctatgaagtcggcccgggcaaagtgcttactggcctgacgaaacgcattgtcgacaccctgaccgccagcgcgctgaacgaacctagtgcgatggcagcggcgctcgagctttaaaagaggaaaatcatgaattttgaaggaaaaatcgcactggtaaccggtgcaagccgcggaattggccgcgcaattgctgaaacgctcgcagcccgtggcgcgaaagttattggcactgcgaccagtgaaaatggcgctcaggcgatcagtgattatttaggtgccaacggcaaaggtctgatgttgaatgtgaccgacccggcatctatcgaatctgttctggaaaaaattcgcgcagaatttggtgaagtggatatcctggtcaataatgccggtatcactcgtgataacctgttaatgcgaatgaaagatgaagagtggaacgatattatcgaaaccaaccttagttctgttttccgtctgagtaaagcggtaatgcgcgctatgatgaaaaagcgtcatggtcgtattatcactatcggttctgtggttggtaccatgggaaatggcggtcaggccaactacgctgcggcgaaagcgggcttgatcggcttcagtaaaagtctggcgcgcgaagttgcgagtcgcggtattactgtaaacgttgttgctccgggctttattgaaacggacatgacacgtgcgctgagcgatgaccagcgtgcgggtatcctggcgcaggttcctgcgggtcgcctcggcggcgcacaggaaatcgccaacgcggttgcattcctggcatccgacgaagcagcttacatcacgggtgaaactttgcatgtgaacggcgggatgtacatggtctgaccgcgatttgcacaaaatgctcatgttgcgcgcagtctgcgtggttatgagtaataattagtgcaaaatgatttgcgttattggggggtaaggcctcaaaataacgtaaaatcgtggtaagacctgccgggatttagttgcaaatttttcaacattttatacactacgaaaaccatcgcgaaagcgagttttgataggaaatttaagagtatgagcactatcgaagaacgcgttaagaaaattatcggcgaacagctgggcgttaagcaggaagaagttaccaacaatgcttctttcgttgaagacctgggcgcggattctcttgacaccgttgagctggtaatggctctggaagaagagtttgatactgagattccggacgaagaagctgagaaaatcaccaccgttcaggctgccattgattacatcaacggccaccaggcgtaagtgaacatctccaggcggtcgttcgaccgcctgagttttatctttttgtcccactagaatcattttttccctccctggaggacaaacgtgtctaagcgtcgtgtagttgtgaccggactgggcatgttgtctcctgtcggcaataccgtagagtctacctggaaagctctgcttgccggtcagagtggcatcagcctaatcgaccatttcgatactagcgcctatgcaacgaaatttgctggcttagtaaaggattttaactgtgaggacattatcagccgcaaagaacagcgcaagatggatgccttcattcaatatggaattgtcgctggcgttcaggccatgcaggattctggccttgaaataacggaagagaacgcaacccgcattggtgccgcaattggctccgggattggcggcctcggactgatcgaagaaaaccacacatctctgatgaacggtggtccacgtaagatcagcccattcttcgttccgagtacgattgtgaacatggtggcaggtcatctgactatcatgtatggcctgcgtggcccgagcatctctatcgcgactgcctgtacttccggcgtgcacaacattggccatgctgcgcgtattatcgcgtatggcgatgctgacgtgatggttgcaggtggcgcagagaaagccagtacgccgctgggcgttggtggttttggcgcggcacgtgcattatctacccgcaatgataacccgcaagcggcgagccgcccgtgggataaagagcgtgatggtttcgtactgggcgatggtgccggtatgctggtacttgaagagtacgaacacgcgaaaaaacgcggtgcgaaaatttacgctgaactcgtcggctttggtatgagcagcgatgcttatcatatgacgagtccgccagaaaatggcgcaggcgcagctctggcgatggcaaatgctctgcgtgatgcaggcattgaagcgagtcagattggctacgttaacgcgcacggtacttctacgccggctggcgataaagctgaagcgcaggcggtgaaaaccatcttcggtgaagctgcaagccgtgtgttggtaagctccacgaaatctatgaccggtcacctgttaggtgcggcgggtgcagtagaatctatctactccatcctggcgctgcgcgatcaggctgttccgccaaccatcaacctggataacccggatgaaggttgcgatctggatttcgtaccgcacgaagcgcgtcaggttagcggaatggaatacactctgtgtaactccttcggcttcggtggcactaatggttctttgatctttaaaaagatctaagttgtcattttccacccttataaaaggtccgcttgcgggccttttttcttagcttttattccgacttgttccgtagtgaacatgctgccacactaacaattctctgataaggagccggtatgttcttaattaacggtcataagcaggaaagcctggcagtaagcgatcgggcaacgcagtttggtgatggttgttttaccaccgccagagttatcgacggtaaagtcagtttgttaagcgcgcatatccagcgactacaggatgcttgtcagcggttgatgatttcctgtgacttctggcctcagcttgaacaagagatgaaaacgctggcagcagaacagcaaaatggtgtgctgaaagtcgtgatcagtcgcggtagtggcgggcgagggtacagcacattgaacagcggaccggcaacgcggattctctccgttacggcttatcctgcacattacgaccgtttgcgtaacgaggggattacgttggcgctaagcccggtgcggctggggcgcaatcctcatcttgcaggtattaaacatctcaatcgtcttgagcaagtattgattcgctctcatcttgagcagacaaacgctgatgaggcgctggtccttgacagcgaagggtgggttacggaatgctgtgcggctaatttgttctggcggaagggcaacgtagtttatacgccgcgactggatcaggcaggtgttaacggcattatgcgacaattctgtatccgtttgctggcacaatcctcttatcagcttgtcgaagtgcaagcctctctggaagagagcttgcaggcagatgagatggttatttgtaatgcgttaatgccagtgatgcccgtatgtgcctgtggcgatgtctcctttagcagtgcaacgttatatgaatatttagccccactttgtgagcgcccgaattaatcatgaaaaaagtgttattgataatcttgttattgctggtggtactgggtatcgccgctggtgtgggcgtctggaaggttcgccatcttgccgacagcaaattgcttatcaaagaagagacgatatttaccctgaagccagggaccggacgtctggcgctcggtgaacagctttatgccgataagatcatcaatcgtccacgggtttttcaatggctgctgcgtatcgaaccggatctttctcactttaaagccgggacttaccgctttacaccgcagatgaccgtgcgcgagatgctgaaattgctggaaagcggtaaagaagcacagttccctctgcgactggtagaagggatgcgtctgagcgattacctcaagcaattgcgtgaggccccgtatatcaagcatacgctgagcgatgataagtacgccaccgtagcgcaggcacttgaactggaaaacccggagtggattgaaggttggttctggccagacacctggatgtataccgccaataccaccgatgtcgcgttactcaagcgagcgcacaagaaaatggtgaaagcggtcgatagcgcctgggaagggcgtgcggacggtctgccttataaagataaaaaccagttggtgacgatggcaagtattatcgaaaaagaaaccgccgttgccagtgaacgcgataaggttgccagtgtatttatcaaccgtttacgcattggtatgcgcctgcagaccgacccgaccgtgatttacgggatgggagagcgttataatggcaaactttctcgtgcagacctggaaacgccgacagcgtataacacctataccattaccggtctgccgccaggtgcgatagcgacgccgggggcggatagcctgaaggctgctgcgcatccggcaaaaacgccgtatctctattttgtggccgatggtaaaggtggtcacacgtttaataccaatcttgccagtcataacaagtctgtgcaggattatctgaaagtgcttaaggaaaaaaatgcgcagtaagtatatcgtcattgaggggctggaaggcgcaggcaaaactaccgcgcgtaatgtggtggttgagacgctcgagcaactgggtatccgcgacatggttttcactcgggaacctggcggtacgcaacttgccgaaaagttaagaagcctggtgctggatatcaaaagcgtaggcgatgaagtcattaccgataaagccgaagttctgatgttttatgccgcgcgcgttcaactggtagaaacggtcatcaaaccagctctggctaacggcacctgggtgattggcgatcgccacgatctctccactcaggcgtatcagggcggcggacgtggtattgaccaacatatgctggcaacactgcgtgatgctgttctcggggattttcgccccgacttaacgctctatctcgatgttaccccggaagttggcttaaaacgcgcgcgtgcgcgcggcgagctggatcgtattgagcaagaatctttcgatttctttaatcgcacccgcgcccgctatctggaactggcagcacaagataaaagcattcataccattgatgccacccagccgctggaggccgtgatggatgcaatccgcactaccgtgacccactgggtgaaggagttggacgcatgagatggtatccatggttacgacctgatttcgaaaaactggtagccagctatcaggccggaagaggtcaccatgcgctactcattcaggcgttaccgggcatgggcgatgatgctttaatctacgccctgagccgttatttactctgccaacaaccgcagggccacaaaagttgcggtcactgtcgtggatgtcagttgatgcaggctggcacgcatcccgattactacaccctggctcccgaaaaaggaaaaaatacgctgggcgttgatgcggtacgtgaggtcaccgaaaagctgaatgagcacgcacgcttaggtggtgcgaaagtcgtttgggtaaccgatgctgccttactaaccgacgccgcggctaacgcattgctgaaaacgcttgaagagccaccagcagaaacttggtttttcctggctacccgcgagcctgaacgtttactggcaacattacgtagtcgttgtcggttacattaccttgcgccgccgccggaacagtacgccgtgacctggcttagtcgcgaagtgacaatgagtcaggatgcattacttgccgcattgcgcttaagcgccggtagccctggcgcggcactggcgttgtttcagggagataactggcaggctcgtgaaacattgtgtcaggcgttggcatatagcgtgccaagcggcgactggtatagcctgctagcggcccttaatcatgaacaagctccggcgcgtttacactggctggcaacgttgctgatggatgcgctaaaacgccatcatggtgctgcgcaggtgaccaatgttgatgtgccgggcctggtcgccgaactggcaaaccatctttctcccagccgcctgcaggctatactgggggatgtttgccacattcgtgaacagttaatgtctgttacaggcatcaaccgcgagcttctcatcaccgatcttttactgcgtattgagcattacctgcaaccgggcgttgtgctaccggttcctcatctttaagagagacatcatgtttttagtcgacagtcactgccatctcgatggtctggattatgaatctttgcataaggacgtggatgacgttctggcgaaagccgccgcacgcgatgtgaaattttgtctggcagtcgccacaacattaccgggttatttacatatgcgggatctggtaggcgaacgtgacaacgtcgtattttcttgtggcgtgcatccactcaaccagaatgatccctacgatgtagaagatttacgccgtctggcggcagaagagggtgttgtagcgctgggtgaaaccgggctggattattattacacgccggaaactaaagtacgtcagcaagagtccttcatccatcatatccagattggtcgtgaactgaacaagccggttatcgtccatacccgtgacgcccgtgccgatacgctggcaattctgcgcgaagaaaaagtgacggattgcggtggcgtactacactgttttacagaggacagagaaacggcgggtaaattactggatctcggattttacatctccttttccggcattgtgaccttccgtaatgcggagcaactgcgcgatgctgcgcgttatgtccccctggatcggttactggtggaaactgacagtccttaccttgcgccggtaccgcatcgaggaaaagagaatcaacctgcgatggttcgtgacgttgcagaatacatggctgtgttgaaaggtgttgccgttgaagaactggcgcaggtaaccaccgataacttcgcccgtctgtttcacatcgacgcttcccgccttcaatccatccgttgaatgagtttttttaaagctcgtaattaatggctaaaacgagtaaagttcaccgccgaaaattgggcggtgaataaccacgtttgaaatattgtgacatatgttttgtcaaaatgtgcaacttctccaatgatctgaagttgaaacgtgatagccgtcaaacaaattggcactgaattattttactctgtgtaataaataaagggcgcttagatgccctgtacacggcgaggctctccccccttgccacgcgtgagaacgtaaaaaaagcacccatactcaggagcactctcaattatgtttaagaatgcatttgctaacctgcaaaaggtcggtaaaagcctgatgctgccggtatccgtactgcctatcgcaggtattctgctgggcgtcggttccgcgaatttcagctggctgcccgccgttgtaagccatgttatggcagaagcaggcggttccgtctttgcaaacatgccactgatttttgcgatcggtgtcgccctcggctttaccaataacgatggcgtatccgcgctggccgcagttgttgcctatggcatcatggttaaaaccatggccgtggttgcgccactggtactgcatttacctgctgaagaaatcgcctctaaacacctggcggatactggcgtactcggagggattatctccggtgcgatcgcagcgtacatgtttaaccgtttctaccgtattaagctgcctgagtatcttggcttctttgccggtaaacgctttgtgccgatcatttctggcctggctgccatctttactggcgttgtgctgtccttcatttggccgccgattggttctgcaatccagaccttctctcagtgggctgcttaccagaacccggtagttgcgtttggcatttacggtttcatcgaacgttgcctggtaccgtttggtctgcaccacatctggaacgtacctttccagatgcagattggtgaatacaccaacgcagcaggtcaggttttccacggcgacattccgcgttatatggcgggtgacccgactgcgggtaaactgtctggtggcttcctgttcaaaatgtacggtctgccagctgccgcaattgctatctggcactctgctaaaccagaaaaccgcgcgaaagtgggcggtattatgatctccgcggcgctgaccagcttcctgaccggtatcaccgagccgatcgagttctccttcatgttcgttgcgccgatcctgtacatcatccacgcgattctggcaggcctggcattcccaatctgtattcttctggggatgcgtgacggtacgagcttcagccacggtctgatcgacttcatcgttctgtctggtaacagcagcaaactgtggctgttcccgatcgtcggtatcggttatgcgattgtttactacaccatcttccgcgtgctgattaaagcactggatctgaaaacgccgggtcgtgaagacgcgactgaagatgcaaaagcgacaggtaccagcgaaatggcaccggctctggttgctgcatttggtggtaaagaaaacattactaacctcgacgcatgtattacccgtctgcgcgtcagcgttgctgatgtgtctaaagtggatcaggccggcctgaagaaactgggcgcagcgggcgtagtggttgctggttctggtgttcaggcgattttcggtactaaatccgataacctgaaaaccgagatggatgagtacatccgtaaccactaatccgtaagacgttggggagactaaggcagccagatggctgccttttttacaggtgttattcagaattgatacgtgccggtaatgctgaaattacgcggtgtgccgtagacgatagaaccttccacgttggtatcgtaggttttgtcgaacaggttattgacgttcccctgtaagctgaagtttttcgtcacctggtagcgggtgaagagatccaccagcgcgtagctaccttgctcggcgcggaaggtgccatacggcgtcacggtgtcggtatacacgcgattttgccagttaacaccaccgccgaccgtcaactctggcatgacaggcaaccgatagctggtgaacattttaaccgtggtgcgtggcagattaggattaacggcgtttccttcgttatcctctgcaatatagcgcgttgcgccaaatgtcagctgccagttgtcggtaattgcgccgttgagttcaaattccacccctttactgactgtcccatccaccgctttataggcggtttcgccgttgctgccggggataggtgtaccggtggactgagcgacattatcctgctcaatacggaagatggctaacgtggtggtcagacggctattcatccagtcgcttttcagacccagctcgtagttgttaccggtgattggagccagatatttgccactactgtcacgatcattttgcggctggaaaatagaggtatagctggcgtaggtgctccagttgtcattgatgtcaaacaccagaccagcgtaaggcgtggtgtggtttttctccatgctgtaagtcagcgtatcaacccgccagttggtataacgtgcgccgaggatcagatgcagcggatcggcaagggtgacacgagtggcagcatataagcttttcatatgtgtggtatcgtcctgcgccaggctctgtggactccagtcggtttgtgggaaattgccattaaagttgtagaaactgccaatttcatccgggaagatgttggcccaactactgaagtaacgattgttttgtttgctgtaactgccaccaaacattagattgtgctgacgaccaaacaattcataactaccgtcagcgaacaaatccagcgcatcaactttacgtttgccactgttccaaccggtgccgccgacataatcaaagccaggtccataattactgtatggcccaaccagcataccatccgctttgtttacataggcatcgacatacatcattttgctgtcaaattcgacttcagagtgggtggcattcagtgtcgcttgccaggtatcagcaaactgctgcttcagggtcataaagaccttgttgatctctttatcgttgtacgcccagtcaggtgcggtactgcgtgcgcgatcgtaactgttgctgctgccatcagtattccagcgcggtaaaccgccccaggtagggctattaacatcaatgcgctgatattcgtaaccggcactaagcgtcgtaagatcgcctaaatcagcatcgacaatgccgctgaagaaggtcttttcactgttgtagcggtccagccaactgtcgttattctggtagccgccgacaattcgcgcgcggattttaccgtcttcggtgagtgggctttgtaaatccgccacataccgttctttgttccagctaccgtattccgcgctgacatcgcctttaaattcacgactggtcgcgtgttttcgaaccatattaattgccgcagatggattacccgtcccggtcatgagtcctgtcgcgccacgcactacttctacgcgttcaaagagtgccatatcagaaagtgcgtcgcccagattccagcggctttcaaaataggtggggataccatcaaccatatagttatcgatctggaatccgcgggaataataaagagcacgatcggaatccgcctgacttttgctgatccccagcgtgttttccatcacttcgcccagcgtttgtaactgctgatcttccatccgctgctggctaacaatagtgacgctctgaggaatatcacgttgagtcatctgcattttggtacccgcagaggtagacgttacgctgtaatcattttcgccatcatctggagctgtggcactaccctcaacaatcaccgtttcttcagtggctggtgcagcaaaagcggcagaaggtaatagtgccagtgctatgcaaccggcaagtagactcggtttggtgatggcttgatattgattatccctgttaaattgtgtactaagcatttgaaatctcttggtttatgttgtcgtcaggctcatgccggaggagggtgatgagcgattatatttagtgtgcgaataattttgtttgtaaatgcaaatgagaaatatacgcattcatatttgtcatgtaaaccaaacagagaatgtcttttcagcgcattcgcaggcagaaatgggaataatggcgatatatacggcagcaaaacgattttttgcttaagaaatcgtgagttaaggttgaaagagcaggtttaactcgaccatactctatactcgcagtgtggcgcggcgtagcatggcgcaacgcatggctatttgaaaaaggaaaatgtcgtggcagaagaaactatattcagcaaaattattcgtcgtgagatcccctccgatatcgtctaccaggatgatctggtaacggcgtttcgcgatattagcccgcaagcgccaacgcatattctgatcattccgaatatcctcattccgactgtgaacgacgtcagtgctgagcatgagcaggcgctgggacgcatgatcaccgtagcggcaaaaattgctgagcaagaaggtattgccgaagatggctatcgtctgatcatgaataccaaccgccatggcggacaagaggtttaccacatccatatgcacttgttgggtggccgtccgctgggaccaatgctggcgcataaaggtctgtaacgatgagaaaaggatgctttgggctggtgtctctggtgttgttactgctggtgggctgtcgtagtcatccggaaattccggtgaatgatgagcaaagcctggtgatggagagttctttattggctgcgggcatcagtgcagaaaagcccttccttagcacgtctgatattcaacctagtgcatccagtacgctttataacgaaaggcaagaacccgttaccgttcattatcgtttttactggtatgacgccagagggctggagatgcatcctctggaaaggccacgcagcgttaccattcccgcacatagcgcggtaacgctgtacggcagcgccaattttctgggggcgcacaaagtcagactttatctatatttgtaaggggtgaatcttgatgacaaaaatgagtcgctacgccttgattaccgcgctggcgatgtttctcgccgggtgtgtggggcaacgtgaacctgcaccggtagaagaagtgaaaccagcgccggaacaaccagccgagccacaacagcctgtccccacagtgcccagcgtgccgacgatcccgcagcagccaggcccaattgagcacgaagatcaaactgcaccgcctgcgccgcatattcgccattatgactggaatggcgcaatgcagccgatggtcagtaagatgcttggggctgacggggtgactgcgggtagcgtcctgctggttgatagcgttaacaaccgtactaacggtagcctgaatgccgcagaagcgaccgaaacgctgcgaaatgcgctggctaataacgggaaatttaccctggtttccgcccagcaactgagcatggcgaagcaacagttaggtttgagcccgcaggacagtttaggcacccgtagtaaagccataggcattgcccgcaatgtcggcgctcattacgtgctgtactccagcgcctctggcaacgttaacgctccgaccctacaaatgcagctgatgctggtgcagacgggcgaaattatctggagtggtaaaggtgccgttagccagcaataagtaaaattatctggtcaggtaaaggtgccgtttcgcagcaataatcccatcacgcgcgacgaattgctgagccgctttttcccgcagtatcatcccgtcacgacgtttaatagtgggcttagtggcgggagttttctcattgaacatcagggccagcgttttgttgtgcgtcagccgcacgatcctgatgcgccgcagtccgcgttcttgcgccagtatcgggctttaagtcaactacccgcatgcattgcaccgaagccgcatttatatctccgtgactggatggtagtcgactatctgcccggcgcggtaaaaacgtatttgccggataccaacgaactggcaggcttgctgtattatctacatcaacaaccacgttttggctggcgaataacgctgttgccgttactggaactgtactggcagcaaagcgatccggcgcggcggacagtgggttggctgcgaatgttaaaacgtctgcgcaaagcgcgggaaccacggcctttacgcttaagtccattgcatatggatgtccacgccggaaatttagtgcatagcgcgagtgggttaaaactcatcgactgggagtatgccggagatggtgatatcgcgctggaactggcggcggtgtgggtggaaaatactgaacagcaccggcaattggtcaatgactatgccactcgcgcgaagatttatccggcgcaattatggcgtcaggtcaggcgatggtttccctggctgctgatgctcaaagcagggtggtttgagtaccgctggcgacaaaccggcgatcaacaatttatcaggctggccgatgacacctggcggcagctattaataaaacaataaggagagcagtgtgggtccagtaatgttggatgtcgaaggttacgaactggacgcggaagagcgtgaaatactggcgcatccgctggtgggagggctgattctctttacgcgtaactatcatgatcctgcccagttacgtgaactggtgcgccagatccgcgcagctagccgcaatcgtctggtggtggcggttgatcaggaaggtggacgcgtgcagcgttttcgtgaaggttttacccgcttgccagcggcgcaaagtttcgctgcgctgagtggaatggaagagggtggcaaactggcgcaggaggcaggttggttgatggccagcgaaatgatcgctatggatattgatatcagctttgcgcctgtgctggatgtcgggcatatcagcgcggcgattggcgagcgttcttatcatgccgatccacaaaaagccctggcaattgccagccggtttattgatggtatgcatgaagccggaatgaaaacgaccgggaaacacttcccaggacacggtgcagtaacggcagacagtcacaaagaaacaccgtgcgatccacgtccacaagcggagattcgcgctaaagatatgagcgtcttcagttccttaatccgcgaaaataaactcgacgccattatgcctgcgcatgtgatctacagtgatgttgatccgcgtccggcgagcggttctccctactggctgaaaaccgttttgcgtcaggaactgggttttgacggcgtgattttctctgacgatttaagcatggaaggtgccgcgattatgggcagttatgccgaacgcgggcaggctagtctggatgcgggttgcgatatgatcctggtctgcaataatcgtaaaggggccgtcagcgtgttagataatctgagtccgatcaaggcagaacgtgttacacgtttgtatcataaaggtagttttagccgacaggaactgatggacagcgctcgctggaaagcgatcagcacccgtctgaatcagttacatgaacgctggcaggaagagaaagcaggtcactaaccctggcttatgtgaggaagcgatgattatctatttacacggttttgactctaacagtccgggtaaccacgagaaagtcttacaattgcagtttattgacccggatgtacgcttgataagctacagtacgcggcatccgaaacatgatatgcagcatctgcttaaagaagtggacaaaatgttgcaactgaacgttgacgagcgtccgctaatttgcggcgttggcttgggcggatactgggcggaacggattggttttctttgcgacatccgccaggtgatcttcaaccctaatttgttcccttatgagaacatggaaggcaagattgatcgcccggaagagtatgccgatattgccactaagtgtgtgaccaacttccgtgagaagaatcgcgatcgttgcctggtgattttgagccgtaatgatgaagcgcttaacagccagcggacatctgaagagttgcatcattattacgagattgtctgggacgaagagcagacgcacaaattcaagaatatctccccgcatttacagcgcattaaagcgttcaaaaccctcgggtaaatgccctcgtcgcatcaggtaaccttgccggtacctgatgcgctccgaattctgtgggtcggataaggcgtccacgccgcatccgacagtcgagcatcaatgcctgatgcgcttcttatcaggcctaccgaacgccctgcatacacccctcactctatatcactctcacaaattcgctcaaataataaacaataaactctgttttttgatctcacccggtaaagtcgcctatcttttcagcaacaaaacttgattaacatcaattttggtatgaccaatgcaccattcatgttattctcaatagcgaagaacattttcattgctgtaacctgttgttaattaagagctatgttaataaccattaattaacaattggttaataaatttaagggggtcacgttgactacgccattgaaaaagattgtgattgtcggcggcggtgctggtgggctggaaatggcaacacagctggggcataagctgggacgcaagaaaaaagccaaaattacgctggtcgatcgtaaccacagccacctgtggaaaccgctgctgcacgaagtggcgactggcagccttgatgaaggcgtcgatgcgttgagctatctggcccatgcgcgcaatcatggtttccagttccagctgggttccgtcattgatattgatcgtgaagcgaaaacaatcactattgcagaactgcgcgacgagaaaggtgaactgctggttccggaacgtaaaatcgcctatgacaccctggtaatggcgctgggtagcacctctaacgatttcaatacgccaggtgtcaaagagaactgcattttcctcgataacccgcaccaggcgcgtcgcttccaccaggagatgctgaatttgttcctgaaatactccgccaacctgggcgcgaatggcaaagtgaacattgcgattgtcggcggcggcgcgacgggtgtagaactctccgctgaattgcacaacgcggtcaagcaactgcacagctacggttacaaaggcctgaccaacgaagccctgaacgtaacgctggtagaagcgggagaacgtattttgcctgcgttaccgccacgtatctctgctgcggcccacaacgagctaacgaaacttggcgttcgcgtgctgacgcaaaccatggtcaccagtgctgatgaaggcggcctgcacactaaagatggcgaatatattgaggctgatctgatggtatgggcagccgggatcaaagcgccagacttcctgaaagatatcggtggtcttgaaactaaccgtatcaaccagctggtggtggaaccgacgctgcaaaccacccgcgatccagacatttacgctattggcgactgcgcgagttgcccgcgtccggaagggggctttgttccgccgcgtgctcaggctgcacaccagatggcgacttgcgcaatgaacaacattctggcgcagatgaacggtaagccgctgaaaaattatcagtataaagatcatggtagcctggtaagcctgagcaacttctccaccgtcggtagcctgatgggtaacctgacgcgcggcagtatgatgattgaaggacgaattgcgcgctttgtatatatcagcctataccgaatgcatcagattgcgctgcatggttactttaaaaccggattaatgatgctggtggggagtattaaccgcgttatccgtccgcgtttgaagttgcattaatcgacgtacactggcggatgtggcataaacgcctcatccgcccttgaggaacagcgcgatcggcagccgcgttgtatcaggcatcctttcagactcctccgaatccttaagtatttccagccattcccgcgcttttcatcttctgtctgatagctgcttttctccttcgcttgcatgattggcataactgcaaagaaggaggtgttcccgtgaataaaagtatgttggcgggtatcgggattggtgtcgcagctgcgctgggcgtagcggcagtggccagtctgaacgtgtttgaacggggcccgcaatacgctcaggttgtttctgcaaccccaatcaaggaaacggttaaaacaccgcgtcaggagtgtcgcaacgtcacagtgacccatcgtcgaccggtgcaggatgaaaatcgcattaccgggagcgtgctcggcgctgttgctggcggcgtgatagggcatcagtttggtggtggtcgcggtaaagatgtcgccactgttgtgggggcgctgggtggtggatatgccggtaaccagatccagggctctctccaggaaagcgatacttacacgactacgcaacagcgttgtaaaacggtgtatgacaagagtgaaaaaatgctcggttatgatgtgacctataagattggcgatcagcagggcaaaatccgcatggaccgcgatccgggtacgcagatcccgctagatagcaacgggcaactgattttgaataacaaagtataacaaggctgtactctgcaatttggcccctcattcgctcaggctgaggggctttttttgcgacttatttcaccagttcgggccataaacgcaaagtcgttccggcaatctgcatcagtttttccaggcttgcaccttcgcgtgcgctgatgctcatcccctgaataatacaattaaggaattctgccagatgtgtcacgtcacagtggggcgggatttccccgcgcgcttgtcgttgacataaaaactgctgcaaagtgcgctcttgcatcgcatggcgacttttcaacgtattggcgatatctccactatctggggagagggtggtgcagttgttgatcatgaagcagcctgccggggtgtctttgctggtaaagcagttggcgatggcagcaaaatagtcagccagcgcagactccacgcttttctcttcacaaaacagctgtgcttcatgcttagcggcaaaacgatcgatatagcggtcgagaacggcacgaaataacccctctttgttggtaaattccgcgtatagcgtgggcgctttggctccggtcgcttcgacgaggtccgcaagagaagtcgcttcataaccgtgttgccagaacaatttcatggccttatcaagcgcggcatccctgtcgaacacttttgggcggccacggcttttttttacacattgtgtactgtcagttgccatgatgccgttgtacctggtgactgtgaatgaaaggttattataaaaataatcacctccgttcaccagtccagatcccataaaaataattgctttctatttaactgaaatttaaagatttttaaattaattaatgattgttataaaaaatatcttgtatgtgatccagatcacatctatcatttagttatcgatcgttaagtaattgcttgcgacgtcattcatctgcataaggccactattatgaaaaacgtaaaaaccctcatcgctgcggcgattttaagctccatgagttttgccagctttgcggctgtcgaagttcagagtacgccagaaggccaacaaaaagtcggtacaatcagtgctaacgcggggacaaatctgggaagcctggaagagcagctggcgcaaaaagcggatgagatgggcgcaaaatctttccgtattacttctgtaaccggtccgaataccctccatggaacagcagtaatttataaataagcattaaccctcattaatgcctgctactgctgattttttccccgcgacatgccgtgtcgcggggatttttttatccgggctttacagcgtttgtgggctcacttgatgacggcggacatccaccggcatcccggaacggacatccatcacatgttgcatcacttcagcgtcagtttgtgctgcatctttaaaactttgcattgcgctattcagcgtaattggcagcagctgcggatcgtcatcaatcttctcactcagcggctgatgtacttcaaccagacgcgcaccgtttggttcggcagagacttttatcggagtgttgatgatattcactttggtgcctggggtgacctggctaaagagtgttttgatatcgtcatcccgcagacgaatacagccagaacttacccgcatgccaatgccgaaatcggcgttcgtaccatgaagcaaataaacgccgccataggccgccagacgaatcgcatgatggcccattgggttatccagtccagccggcactaccgcaggcaactcaattccctgtgctttataacgggcgcggatgtttgccgttggcgtccaggttgggtttgcacgtttgtcactaacggtggtcaccattgtcggtgtcagcgtgtcaccacctaactgaccaatacctattggatacacggttacgctatttttacccggcgggtagtaatagagacgcagctccgcaatgttgatcacaatgccttcgcgcggcgcatctggaagtagggtttgcaacgggatcgttaacacgctgcccgcgcgcggtacgtaaggatcaacgccggggttagcctgtaacagagcgagaaagccgacgttgtattttttggcgatggcttccagagaaccaccgtcattttccaccacatgaaatttgttttcgccaaccagacgactgcccgctggcggcagcggccaggtgttggcttttgccggtagcgccagcgccacggcagcggcgaacgtaaaaaacgttagccagcgagaaaaacgcgttttgatcatcaccaaaaatccataataaatataaggttattgtaataaacagataagcctgaattatggatggtgacagtgtcggatagtgcagggaagtgcaaagaatttgtaaatgttgcagatgggggcgcagaaacgcccccgatttaccattaagcgatcgcgttctcttccagttcacgcataaactggcgtacccattcgatacgcgttttccgctcactcaaatcctgaataaatttcaggcgcgtcggaccatcaaggcggtaatgctgcggctgtttttgcagcaaaccaatcaaccaggccggattaacgtgattcttctcggcaaattcgatcaccccgcctttctcattaccttccagcttcctgatccccagtttctgcgcttgctggcgcagacgggcaatatccagcagggtacgcgccggatctggcagcaggccgaagcgatcgataagctcgactttgatctcttccagttcgttttccgttttggcgctggcaatacgtttgtagaagctcagacgcgtgttcacgtcagggatgaaatcatctggcaataggctcggcatccgcagctcgacttctgtttgctggctggtgagatcttccaggctcggctcgcgtccggctttcagtgcatcgacggcgttttccagcaactccatatacaggctgaaaccgatggtttccatactgccgctttgttcttcgccaagcagttcacccgcgccgcgaatctccagatcgtgcgttgccagcgcaaaacctgccccgagatcttccaggctggcaattgcttcaagacgtttttgtgcatcggtagtcatcgcttttggatgcggtgtcagcaaccatgcatatgcctgatgatggctacgtccgacgcgaccgcgtaactggtgcagctgcgccagaccgaagtgatccgcgcgttcaatgataatagtgttggctgtcgggatgtcgatcccggtttcgataatggttgtacaaaccagcacgttgaaacgttgatgatggaaatcattcatcacccgttccagttcgcgctcgcgcatctgcccgtgaccgatggcgatccgcgcttctggcaccagttctgccagccgttcggcggctttctgaatgttttccacatcattgtagagataataaacctgtcctccgcgcaaaatttcacgcaggatcgcctcccggaccaccatgctgtcatactcacggacaaaggttttaactgccagacgacgggcgggcggcgtggcgataatgctcaggtcacgcattccgctcattgccatattcagcgtacgtgggatcggcgttgcagtaagcgtcagaatatccacgttcgcgcgcatcgctttaatgcgctctttatgacgcaccccgaagcggtgttcttcatcgacaatcagcaggcctaaatctttaaacttgacgtcactttgcagcagtttgtgcgtaccgatcagaatatcgattttcccttccgccacttccgcaaggatttgcgtctgctctttggcgctgcggaaacgggagatcatttcgatacgtaccggccagttggcgaaacggtcgcggaagttgtcgtaatgctgctgcgcgagaagggtggtaggcaccagcaccgccacctgcttgtggttatctactgccaggaaagctgcgcgcatcgccacttctgttttaccaaagccaacatcgccgcacaccagacgatccattgccagcggctgacacatgtcgctaagtaccgcattaatggcctgcgcctgatccggcgtggtttcaaacgggaagctgtcgcagaacaactgatactgctcacgatcgtgtttaaacgcgaagccctctttggcggcgcgttgcgcgtagatatccagcaattccgccgccacatcacgcactttttccgccgctttctgccgcgcgcgactccacgcatcgccgccaagtttatgcagcggggcgttttcttccgcgccacctgcgtaacggctaatcagatgcagactgctcaccggaacatacagtttggcgtcgttggcataggtgagcatcagatactcgccagtaatgccacccgcttccagcgtggtcattccggcataacgaccgacgccgtgctccagatggaccaccggctgaccaatatgcagttccgcaaggttacggatcagtgtatcggggttgatggtgcggcgagaatcctgacgacgacgggcaacgcgttcaccgagcagatcgctttcgcaaatcagcgccagattacgcaccgtatcgacaaaaccatgttcggcagcgccaatcatcagataacgcccacggtcgctggcttcatcaagacgcataatgcgttgcggagcaattttaattcgtgcgagcagttcacccagcgcttcacggcgaccttcactttctacgctgaacaccaccggaccgtcgaaagtctcgaggaacttacgcagcgcatccagcggcgctttttgttgtgcctgaacggccaggtctggcagtttctggaaacctaaattggcattcgcggcttttgtcggtaaatgttcagtttttagctgcacccggggccagtttttcagctcactgaagagctcgtccacccgcagccagaggctttgtggtggcaacagcgggcgcatcggatcgacgccgcgattctcaaaacgcgccagcgtgtcagcctggaaacgttcggcactggtttccagatcgccagtattcacgagcaaggtattggcagggaaataactgaacagcggcggcagtggttcgctgaagaacaatggctgccagtactcgatcccggcaggtaatgtgcctttactcacttgctggtaaatatgttctggatcgcgcttcacttcgaaggtatcgcgccactggctgcggaacagttcaattgccgctttatcggtcggaaattcgtgcgcgggcagcagattgatcgcttctacttcctccagcgtgcgctggctgtcgacgtcaaacacccgcaggctgtcgatttcatcatcaaagaaatcaagacgataaggcagctcactccccatcgggaagagatccagcaacgcgccgcgcgtggcgtattcgccgtgctccatcacctggtcaacatggcgataaccggcgctgtccagttgggttcgtaatgcatctcgactcaggcgctgaccttttttcatcaccagcgcatgaccgtggagaaaactgtgtgggcaaacgcgctgcataagcgtattcaccggaacaatcagtacgccacgctgcatcgtcggtagctggtaaagggtggaaaggcggctggagataatgtcctgatgagggctaaaactgtcgtagggaagagtttcccagtccgccagattcatcaccatttgatcggtaaactggctgatttcatcatgcaaacgcagagcattttgcatatctggtgcaatgagtaccaccggaccggcgtgacgttcggcaatttccgctaccagcgttgcacaggctgcgccggttaactcgcccagcagacgctgctcacccgctttgacgggcagcgtataacgatattgttcaggcataacggttgtcagattctcgttaggatatgcctcaacatatgggggcatatctctgataagcaatgctgttcattatccgtaatcgacatggtttagcaaattgaatcgccccggctggggcgatggcttagcgggagtaactgacggcagcgggcagactaggcggggagaacaacagatcgctgaatgcacgctgactaagttttcttaccagcaagcccgcaacagtacagatgaacaaactgacaaagggataaaccagcaggagtgtcagttcgacttgcgggctccagcgtgctgcgttcatttgcgcaagcagagttaagctgaatatttcaaccagaatgcgatgggtggtgtagatagcaatggtgttggagccaatcacattcagcaggctggtggagcgcataccgaatcgttgctcgtattgataaaacagcttcatgatcaccacaatgcttaccaggctcaacagcaggctgatagtaaacaaccaggcaccgaccgccagaacggtaagcaaagaagccatcagcagatggcggcgcaacggcacctctttaacacaggtcattattgttgcgccaaaccatgcgccaaggctgtaataaggcaaattgcggatcacactgttcattccccaccacggcgtgggaacgaaattaaccgccacactcagcagtacaaacaaggcgaatagtggcagcgccagacggctaaaaattttacataccacgaaatagacaattaacgcatacagataccacaagctggtgctggcggtgatcatcccgtgcaggaactcaccggtggaatcggcataagcggcattggaggcattgcttaaatcgcgctcaggtgccagccactggttcagcgcacttaacgccagccactgcaccacgccccaaagcgccagcacccagaagatgttccagatccgtttatcgagacaatttccccacggtacgctgtcgatatagcggcgaatcaaatagccggatataaagaaaaaaaccggcatacgaaagggggcaaggtaaagattgaaatagatccagcatttgctcaggacttcgcttaacggatgctgaaaagtggtcagatgcggataaaaggtaatgacgctgtgataaatcaccaccagacaaatacataaccctttgatctggttaatccatagctctttttgtttcatcaggacaacacgctcttttttaatttacatgcggttgatcctgcgggttatgacccgaggtgtaatgggtatctgtctgtattggatgatttttcagattaagatcaggcggcaagattgatgataaaacatggcaatttagccgattgatttacgggggcttttcagattagccctgacgatcacttacagttcagacgtttacccatcttgctttcgcttatatactcgtgtctttgctacagcaaccagacggatttcatgtaccaacctgtcgctctatttattggcctgcgttacatgcgtgggcgtgcagcggatcgcttcggtcgtttcgtctcctggctttctaccatcggcattaccctcggggtgatggcgctggtcacagtattgagtgtgatgaacggctttgagcgcgagctgcaaaacaacatccttggcctgatgccacaggcaattctctcttctgagcatggctctcttaacccgcagcaactcccagaaacggcagtcaaactggacggcgttaatcgcgtcgcacctattactaccggtgatgtggtactgcaaagcgcgcgcagcgtggcggtcggggtgatgctcggtatcgacccggcgcaaaaagatccacttacaccgtatctggtcaatgtgaaacaaactgacctcgagccggggaaatataatgtcatcctcggcgaacaacttgccagtcagctaggcgttaatcgcggtgatcaaatccgcgtgatggtaccatctgccagccagttcacgccgatggggcgtattccaagccagcgcctgttcaatgtgattggcactttcgccgccaacagtgaagtcgatggctatgaaatgctggtgaatattgaggatgccagccgtctgatgcgttatccggcaggcaatattaccggctggcgtttgtggctggatgagccgctgaaagtcgacagtttaagtcagcaaaaactgcctgaaggcagcaaatggcaggactggcgtgatcgtaaaggcgagttgttccaggccgtacgcatggaaaaaaatatgatgggtttactgctgagcctgattgtcgccgttgcggcgtttaacattattaccagtctagggctgatggtaatggagaagcagggcgaagtagcgatcctgcaaacgcaaggcttaactccgcgacaaatcatgatggtctttatggtgcaaggggccagcgccgggattatcggtgcgatcctcggagcggcgcttggcgccctgcttgccagccagttaaataatctgatgccgataatcggcgtcctgcttgatggcgcggcgctgccggtggctatcgaacctttacaggtcattgttattgcgctggtggcgatggctatcgcgctgctgtctacgctttaccctagttggcgcgctgccgccactcaacccgctgaggctttacgttatgaataagatcctgttgcaatgcgacaacctgtgcaaacgctatcaggaaggcagtgtgcaaaccgatgtgctgcacaatgtcagtttcagcgtcggcgaaggtgaaatgatggcgatcgtcggtagctctggttccggtaaaagtaccttgctgcacctgctgggcgggctggatacgccaacctccggcgatgtgatttttaatggtcagccaatgagcaaactgagcagcgcagcgaaagctgaactgcgcaaccagaagctgggctttatttatcagtttcaccacctgctgccggattttaccgccctggaaaacgtggctatgccgctgctgattggcaagaaaaagcccgctgaaatcaacagccgtgcacttgagatgttaaaagcggtggggctggatcatcgtgcgaatcaccgcccatctgaactttctggcggcgaacgccagcgtgtggcgattgcccgtgcgctggtgaataacccgcgcctggtactggcggatgaacctaccggtaacctcgatgcgcgtaacgccgacagcatcttccagttgcttggggaattgaatcgcttgcagggcaccgccttcctggtggttactcacgacctgcaactggcgaaacgtatgagccgccagttagaaatgcgtgatggtcgtctgacggcggaactgagcctgatgggggcggagtaatggcgatgcctttaagcttattaattggcctgcgttttagtcgcggacggcggcgcggcggcatggtgagcctgatctccgttatttctaccattggcattgccctcggcgtggcggtattgatcgtcggcttaagcgcgatgaacggctttgaacgcgaactgaacaaccgtattctggcggtggtgccgcatggtgaaatcgaggcggtggatcagccgtggactaactggcaggaagcactggatcacgtgcaaaaagtgccgggtattgccgctgccgcgccgtatatcaatttcaccgggctggtggaaagtggcgcgaatcttcgcgcaatccaggtgaagggcgttaacccgcaacaggaacagcgtctgagcgcattacccagctttgtccagggcgatgcgtggcgcaattttaaagcgggcgaacagcaaattatcatcggcaaaggcgtggcggatgcgctgaaagtgaagcagggggattgggtgagcattatgatccccaacagcaatcccgagcataaactgatgcagccaaaacgtgtgcgtttgcacgttgccggtattttgcagttgagtggtcaactcgatcacagttttgccatgatcccgctggcggatgcccaacaatatcttgatatgggttccagcgtgagtggtattgcccttaaaatgacggatgttttcaacgccaataagctggtacgcgatgcgggtgaagtgaccaacagctatgtttatattaaaagctggattggtacttacggctatatgtatcgcgatatccaaatgatccgcgccattatgtatctggcgatggtactggtgattggcgtggcctgtttcaacatcgtctccaccttagtgatggcggtgaaagacaagagtggcgatatcgcagtattaagaacgctgggggcgaaagatggtttaattcgcgccatctttgtctggtatggattgctggcagggctgttcggcagcctgtgtggtgtgattatcggcgtagtggttagtctgcaacttaccccgattattgagtggattgaaaagttgatcggtcatcagttcctctccagcgatatctattttattgatttcctgccaagcgaattgcactggctggacgtcttctacgtactggtcacagcattgttgctgagtcttttggcaagttggtatccggcgcggcgcgccagtaatattgaccctgcgcgagtccttagcggccagtaaaggcagtacattaaaacaaggagcggcaatgtattacgggtttgatattggtggaacaaaaattgcgcttggcgtgtttgatagcggtcggcagttgcagtgggaaaagcgggtgccgacaccgcgtgacagctatgacgcatttttagatgcagtgtgtgagctggtagctgaagctgaccaacgttttggctgtaaaggttctgtcggcatcggtattccgggaatgccggaaacagaagatggtacgctgtatgccgccaatgtccccgctgccagcggtaaaccgctgcgtgccgacctgagcgcacgtcttgatcgcgatgtacgccttgataacgatgccaactgttttgcccttagtgaagcctgggatgatgaatttactcaatatccactggtgatggggttgattctcggcaccggtgttggcggcgggctgattttcaacggcaaaccgattaccggtaaaagctacattaccggcgagtttggccatatgcgtctgccggttgatgcgttaaccatgatggggttggatttcccgttacgccgctgcggctgtggtcagcatggctgcattgaaaattatctgtctggtcgcggttttgcgtggctgtatcaacactattatcatcaaccgttgcaggctcccgaaattattgcgctttatgatcaaggcgatgagcaggcaagggcgcacgttgagcgttatctggatttattagcggtttgtctgggaaatatcctgaccatcgttgaccctgacctggtcgtcattggtggtggcttaagcaatttcccggcaatcacaacgcaactggcggacaggctgcctcgtcatctcttacctgtagctcgtgttccgcgcattgaacgcgcgcgccacggtgatgcgggaggaatgcgtggtgcggccttcctacatctaaccgattaaacaacagaggttgctatgctgagccgtcggggtcatcggttaagtcgttttcgtaaaaataaacgccgcctgcgcgagcgtttgcgtcagcgtatttttttcagagataaagtggtgccggaagcaatggaaaaaccaagagtactcgtactgacaggggcaggaatttctgcggaaagtggtattcgtacctttcgcgccgcagatggcctgtgggaagaacatcgggttgaagatgtggcaacgccggaaggtttcgatcgcgatcctgaactggtgcaagcgttttataacgcccgtcgtcgacagctgcagcagccagaaattcagcctaacgccgcgcatcttgcgctggctaaactgcaagacgccctcggcgatcgctttttgctggtgacgcagaatatcgacaacctgcatgaacgcgcaggtaataccaatgtgattcatatgcatggggaactgctgaaagtgcgttgtagtcaaagtggtcaggttctcgactggacaggagacgttaccccagaagataaatgccattgttgccagtttccggcacccttgcgcccgcacgtagtgtggtttggcgaaatgccactcggcatggatgaaatttatatggcgttgagcatggccgatattttcattgccattggcacatccgggcatgtttatccggcggctgggtttgttcacgaagcgaaactgcatggcgcgcacaccgtggaactgaatcttgaaccgagtcaggttggtaatgaatttgccgagaaatattacggcccggcaagccaggtggtgcctgagtttgttgaaaagttgctgaagggattaaaagcgggaagcattgcctgatgcactacgcttatcaggcctgcaaggggacgcaattaattgaatttgcgggttttgtgggccggataaggcgttcgcgccccatccggaataatacacgcgcacttttccggcctcttttatcgtttactcgtcaataacaatgcggcaataaacgtacagacaccaattagccctgcccagagtgggcttattctggtaatcgcaaagctattatcgatatacaaacataaagcctgataacccatattggcaatagtcatcgccactgcaaattttaacgcataaataaaacgagtcgtgtagtaaaagatcctggaaaataagataaacgtcgcagcccaggcgataaaacctaatgtgttggtgctgccggggggagcattttcatgctgttgtcctggatgcggataatacgttagtggcggcgtgctttgttttaatatctgtgcttgtagaacagccaatgcattattgattccctgataccagagatctgcatttaaataagccagcgtgtgattttctatcagaaggccgagatgtttatcgtccagaccactttcaacctggccgttggtgatcataattaaccgtggttcgcgggtagtaaatagtaacagaacacttccttttacatcactcaaactagaactcgcatgcgccagcatcgctttaccattttgtctgagactggcttcattattaatgtcgggtaaaaccacaataaacggtgcaattcccgtttgttggcgaaaaagctcggctttatgcgcgatctcttcagcatctggtacagtaccggtaacgtccgtaaaaagtgtcttcattattggaattaatggcttgctggctgctgtcagaggcaggagtatcagtaaactgagcagtataatgaattttttcatgggcgggacttccgtttcctgcgactttttttagaggagggcatacttattaataaaccgacggcgataaaaataacgcccataatgccgataaacccccatttaaaaaaattaacccacgggttatttatctcagccttttcaggatgcccgggagaataataaacattaactttatcgccttcgctgtcttcataaaaatcgctgccgatactgctattgaaaattagcgtgtaatctggcgtcggtcgaaaggcaacgacgggataccagctaccatctttacccgtgcgatgagaatgactggagtgccagacggtatcaacaatgacgccttcggtatgaatcgcgtctttgctataggtgaactggttataaaagacaacaacagaaatgaggatcagtaccagaccgataccgaggaatatacgaaagaaaactttactgtcctgactcattagccacatccttgctaactaaaaaacgggcggtaataccaccgcccgcttgctgaattaacgtcctgctttcagcttctgataatactcttcataaatgctgctggctgcgccaacgtcattctgccattcgccatttttaatggtttcagcatccgggtagagtgttttatcgttcgccacttctggacttaacagcttacgcgccgcaaggtttggcgttggataaccgatagtttcagcaacctgttttgccacatccgggcgcagcaggaagttgatcaatttcagcgcgccttctttgtttttggcatttgccgggatcgccaggctgtccatccagaaaatgccgccttctttcggccacaccacgtcaattggcgtacccgcctggcgtgcaacgaaagcagaaccgttccagatcatgccgaggttaacttcgccttccatgtacgggttcgccgggttatcggagttaaaggctgccacgtttggcatcagttttttcagctcgttatatgcagcttcaatctctttcggatcggtggtgttaccggagtagcccagcttacgcagcgccatctggaacacttcacgggcatcgtcggtcaacagcaggctgcctttgtactctggcttccacagatcggcccagctggtgacagatttcggatccaccgcatcaccgttaacaccaatcgccgtcgcaccccagatatacggaatggagtagtcgttattcgggtcaaaaggcttgttgagcatgtctggatcgagattgctgaagtttgttaacttgctcttgtcgatcttctggatcatcccttctttacgcattttatcaacgtaataggtactaggaaccaccagatcataggcaccgtctttgtatgttttcagcttggcgtacatggtttcgttgctctcgtaagtgctatagataaccttaataccggtttctttggtgaactgttcaagcagtcctggcggcacgtactcggtccagttgtagaaatacagcgtgttgttgtcatcggcgtgagcggcgctcatgcccagtgccagagcacccgccgcgagcaggtggcgactccattttttcatttaacgtcccctgtgttacctttcgttttatcacgagcaataagctggctggcaataaccatcaccaggctcagcaccagtaatatggttgccagcgcgttaacttccgggcttacgccgactttgaccatgctataaatttttaacggcagaatttcataacttggtccggtgacgaagctagaaactaccacatcgtccatgctcagggtaaagcttaacacccagcccgccgccaccgctggcattgccagtggcagaatgatttttcgcagaatggtaaattcgctggcaccgagatctttcgccgcttccagcattcgcacgtcaaaacctttcaggcggctatacaccgtcaccaccacaaatggcaggcagaaggtgatatggctgaacagcaggctccagaagccaagctgaatacccagcagcataaacagcaccagcaggctaatcgccatcacgatatctggactcatcatcaccacaaacagcattccgctaacgaacggcttaccacgaaagcgataacggtacagcgcaactgccgtcagactaccgataagcgtagcaaacgtcgcgctaaacaccgccattgttagactatgctgcgctgcctgtaacaggctgtcgttgttcatcagcaggctataccatttggtggtaaagccctgccagttgatgccaaagcggctgctgttaaaggagttcacaatcaaaataatgattgggatatacaggtacgcgtagatagcggtcataaaaccgccgcgaagcagtcgaccgatcattcgagttccaccttcttattcagcaaacgagaagcgcgccagtaaaccagcaacatcaggcccattacgatagtcagcgtaatgctggtagctgcaccaaacggccagtcacgaatattaaggaactggaccttgatgacgttaccgatcagcaggtttttcgcaccgcccatcaggtcggatacatagaacaggcccatcgctggcagcatcaccagcagacatccggcaataattcccggcatcgtcagtggaataatgatacggataaaagtctgtaacttgctggcaccgagatcgcgcgccgcctcaagcaacggcttatccagtttttcgatactggagtacagcggcatcaccataaacggcagcagaatgtaaaccagaccgataatcaccgcactgggcgtgaacatgatacggattggtgtgtcgataacgcccagccagagcaaaaactcgttgagatagcctttggtgctgaggaaaattttcagcccgtagatacgaattaaactgttggtccagaacggaacaatcagcagaaacagcagcagcggacgcaccttgtgtggcaacttcgccagaaaccaggcaaacgggtagcccagcaccaggcaggcgagggtggcgatcagcgccatattcaggctgtgcaatagcacttcaaaatagagcggatcgagcagacgcgtgtagttatccagcgtaaagaccattttgacaaaactggcgtcgtcgcgggtcaaaaagctggtgccaatgatcatcaggttgggcagaaagacaaacaacacaagccaaccgacaatagtgacaatcactacattctggaacttacttgtgttcttcatcagccagtacgacctcccagctttctacccaattaatggccattttttggtcgagagagtggtcaaagtcaggatcgtcttcattgaagaattcgctgaccatcaccatcttgccattttccagttcaacaacgctctccagcgtcatgcctttgtagttacgctcgcgaacgtaaccaatcagcccttcagcgtggttgtcgtcgttaatctcttcaacacgtaagtcttccgggcgcagcagaacatgcagtttttgccccggttcaacggcgaagttaacgtagatattacattcgcggccttcaacgttggcgcgtacgcgctgctcgtctagacgttcgatgacagtggcgttaaacatattgatttcgccaatgaagccggcaacaaacaggtttttcggctcttcgtagatttcacgcggcgtgccgtcttgctcaatgcgaccatcgcgcatcaccacaatcctgtcactcatggtgagtgcttcttcctggtcgtgagtcacaaagacgaatgtaatgccaagcttacgctgtaacgctttcagctcgttctgcatttgcttacgcagtttgtaatccagcgcactgaggctctcatccagcaacaacagacgaggcttgttaaccaccgcgcgagcaatggcgacgcgttgctgttgaccaccagagagctgatgcggtttgcgttgagcgaaggtttccaactgcaccatccgcagggcttccatcacgcggggcgtaatttcagcagcgggggttttttgcatgcgcaacccaaaggccacattttcgaacacggtcatgtgggggaaaagtgcgtagctttggaaaacagtgttcacatagcggttttccgccggaacgtgggtgatgtcctcgttatccagcatgatgcgtccggaatcaacagtttccagacctgcaatcaggcgaagaacggttgttttaccgcagccagaagggccaagcagcgtgaggaactcgccattgttgatagtcagatccagctggggaatgacctctttaccatcaaagcatttgcgaattcccgccaattgcaccagcggactaaggctactcggttgtttattcaattttttactctgtcccatgtaaacgcaacggatggcttaccgatgcggggtttgtggttaaccaccttggtgactcttaatgagggcggtaattctacggcaaaccgcttgaatcgccaatctttgttgtgaattactggcttagctttatattcattaaggtaatgctgataaatattcccgcttgcaggggtaaaagtgacctgacgcaatatttgtcttttcttgcttcttaataatgttgtcacaaaaagtgagggtgactacatggataaactacttgagcgatttttgaactacgtgtctctggatacccaaagtaaagcaggggtgagacaggttcccagcacggaaggccaatggaagttattgcatctgctgaaagagcagctcgaagagatggggcttatcaatgtgaccttaagtgagaagggcactttgatggcgacgttaccggctaacgtccctggcgatatcccggcgattggctttatttctcatgtggataccagtccggattgcagcggcaaaaatgtgaatccgcaaattgttgaaaactatcgcggtggcgatattgcgctgggtatcggcgatgaagttttaagtccggttatgttcccggtgctgcatcagctactgggtcagacgctgattaccaccgatggtaaaaccttgttaggtgccgatgacaaagcaggtattgcagaaatcatgaccgcgctggcggtattgcaacagaaaaaaattccgcatggtgatattcgcgtcgcctttaccccggatgaagaagtgggcaaaggggcgaaacattttgatgttgacgccttcgatgcccgctgggcttacactgttgatggtggtggcgtaggcgaactggagtttgaaaacttcaacgccgcgagcgtcaatatcaaaattgtcggtaacaatgttcatccgggcacggcgaaaggagtgatggtaaatgcgctgagcctggcggcacgtattcatgcggaagttccggcggatgaaagcccggaaatgacagaaggctatgaaggtttctatcatctggcgagcatgaaaggcaccgttgaacgggccgatatgcactacatcatccgtgatttcgaccgtaaacagtttgaagcgcgtaaacgtaaaatgatggagatcgccaaaaaagtgggcaaagggttacatcctgattgctacattgaactggtgattgaagacagttactacaatatgcgcgagaaagtggttgagcatccgcatattctcgatatcgcccagcaggcgatgcgcgattgcgatattgaaccggaactgaaaccgatccgcggtggtaccgacggcgcgcagttgagctttatgggattaccgtgcccgaacctgttcactggcggttacaactatcatggtaagcatgagtttgtgactctggaaggtatggaaaaagcggtgcaggtgatcgtccgtattgccgagttaacggcgcaacggaagtaagcgaaaagggatgcggcatgtgatgccgcatccggcttaaatccaaacttacccttcgaagaaccaatacccgctattgaccagcgccgcgagcatcgcgaggaaactcggatcttccagcgcatcgccaaaattctccgcagtcagcgcaatgttgctggcgagtgcatccagtgccggacggtgcggggaatcgatcttctcaccattggcatacacgtcgtcgccaatgcgcaatacgcgcagaccacccaggcgcaccagcacttcaccttgtttcagcgcatcgtagatttcatccggctgataaggcggctctggcggcgcgatatccagttcatgacgactctgggatataaactcgccaaaccattgcttaaagtgttccggctggttgatcaattcgagcatcatctcacgcagtttatccatctcttgcggcagaacatccgcaggatgagcgcgaggtggaacatccggatcgctgtagtagttgccgcccagttcacgttgcagcacataatcggcaaatccactaatcagttcccgcgtatttggcgcgcgaaagcccacggaatagttcatcgcattttccagcgcgtagccttcatgcgggaatcctggcggaatataaagaatatcaccaggctccagctcttcatcgatgatggcttcgaacggatcgacctgtaacagatccggatgtgggcagtgctgtttcatttgcagcttttcgcccactcgccagcgacgacgtccggtaccctgaatgataaacacgtcgtactgatcgagatgcgggccgacgccgccgccgggtacagaaaaagaaatcatcagatcatcaatacgccagtccggtagttcacggaacggtcgcatcagcgcggcggtcggctcatgccagtggttcactgcctgtaccagtaaactccagttggtttcaccgagatgatcgtagctttcgaacgggccgtggctgacctgccatttgccatcctggtgactgaccagtcgactgtcaacttcgctttccatcgccagacccgccaactcgtctggagagatcgggtcaataaaattattaaagccgcgttttaacaccaccgggcgtttctgccagtgacgttcaagaaaatcgggccagttaagagtgagttggtattccatgttaagcatccacaggctggtatctgcaaccgattataacggatgcttaacgtaatgcgtgaagtatgggcatatttattcatctttcggcgcagaatgctggcgaccaaaaatcacctccatccgcgcaccgcccagcatgctctctccggcgacgattttaccctcatattgctcggtgatttcgcgggctaccgccagccctacaccttgcccagggcgtaaagtatcaacccgttgaccacggtcgaaaatgacctctcgcttgcttaatggaataccggggccatcatcctcgaccacaatatagagatgctcgtcggtttgccttgcagaaatttcgacaaactcgaggcaatatttacaggcattatccagcacgttgcccatcacctcgacaaaatcgttctgctcaccgacaaagctgatctctgggctaatatcgagagagatattgacccctttgcgttgatacactttgttcagcgcactggtgagattgtccagcagtggggcgaccggatgcagctcgcggctgagcaatgtcccgccgcgcatactggcacgatgcaggtagtagccaatttgctgactaatgcggctgatttgctccagcattaccggctcagcatcactgacgctcatcttttcactacgcagagaacgcagcgtactttgcagcaccgccagtggcgttttcagactatgggtcaggtcggtgagcgtcgtacggtatttgtcgtaacgttcgcgttcactttttaacaatcggttcaggtttcgtaccagactggtcagttctcgcgttgtggctggattgagcaattcgcggttatgttcttccagttcgcggacttcttttgccagggcttcgatggggcgtaaactccaccaggcggcgacccacagcagcgggatcactaacagcagattggcactgagcacatagataaaccagctccagaccatataggaactttttagctccaccggaatggtatccaccaccacaatggttaattttggcatccggcttgttgccgggtagacgtttactgccacgctgtgggtcatctccgcgtcgtcatcatcttcccgcacttcctgcaactgttgctgtatgctatgatctccactcagcaagaggctggtatcgttaacatccgcttcaatttcatgaaaaccattgcttttcagccagtcaggctggatcatcttcatcagccagggcacgtcacgttgcgcccataaaagctgcccgttctcatcataaattagcgtcatggtggggctttgcttgtcgatattttcgggtaactcgacatgcaacttattgttttcccacttcgcaagggtatagaacagattgctctcgccacgtaacagccgaaacgtagttttatcgaaactgacgctataaccgatcagcgcgaccattccgtaggcaaggctaagcaccagtactaccgctgccgttgccaacagaaaacgtacccgcaggctgagcgggaaaaaaagacgcagtaattttttcatcagcgcaattcgaacagatagccctggccgcgaacggtggtaatcacttcttggggatattgtgcctgaatttttttgcgcagacgtcccatcagtacatcaatggtatggctttcccgcagctccgcatccggatagagttggagcattaagctatctttgctgaccactttgccattattgcgtatcaacgtttccataatagtgtattcgaacgcggtcagtttgatcacttcgtcattaatagataattcacggcgagagagatcaacctgaaacggggggaggctaatgacctgactagccagaccgctattacgccgcattaatgcctgcattcgcgccatcacctcttcaatatgaaacggtttagtcacataatcatcagcaccggcacttaatacttcgactttgtcctgccagctttcacgggcggttaataccagaatcggcagactaacatcgttgctacgccagcggcgaatcagactcagaccgtcctcgtctggcaatccgagatcgacaatcgcaatatccggtatatgttcattgagataataatcggcttctttggcatcttctgcgtcatcgacctgatgaccagcatcctgaatctgaactttaaggtggtgacgtaacaacgcattgtcttcaacaaccagtacgcgcatttttatttctccctgtcttaattattaaaatagtgtaacgcgattatgtggttatgggggtaaacattaaataaaccagcggggaggggaggtaaagtgaaaaaataaaaagcggataatcttaataagcaggccggacagcatcgccatccggcactgatacgaggtttatttcagctcatcaaccatcgtgatagctcgaccaatatagttagccggcgtcatcgctttcaggcgggctttctcttcttctggcaacgccagaccatcgataaactgcttcatgccttcggcgtcaacgcgcttaccgcgagtcagctctttcagcttctcgtacggtttttcgatgccatagcgacgcataactgtctggattggttcagccagcacttcccagttgtgatccagttcatccagcagatggtcacggttcacttccagtttgctcacgcctttcagggtggattgatatgcaatcaaggcataaccgatacccacgccgaggttacgcagcacggtagagtcggtcaggtcacgctgccagcgggaaaccggcagtttgcttgccagatgctgcaataccgcgttggaaaggcccagattcccttcggagttttcgaagtcgatcgggttaactttatgcggcatggtggaagaaccaatctcaccagcaatggttttctgtttgaagtggttaagggcgatataaccccagacgtcacggtcaaagtcgatcagaatagtgttgaagcgcgcaacgcaatcaaacagttcggcaatgtagtcgtgcggttcgatctgggtggtgtacgggttccactgaatacccaggctggtgacgaactcttcgctgaactgatgccagtcaacttccgggtaagcggcgatgtgggcgttatagttaccgaccgcgccgttgattttgccgaggatctccacctggttaagctggcggtactggcgctccatacggtaggcgacgtttgccatctctttaccgatggtactcggcgtggctggctgaccgtgggtacgagacagcagcgggatatcgcgatactgaacggcgagatctttaatgccatcaatcagttgacgccagtatggcaggatcacttcatcacgcgcggttttcagcattaatgcgtgggagaggttattgatatcttcgctagtacaggcaaagtggatgaattcagaaaccgcgtgcagttccgggatctccgccactttttctttcaggaaatactcaaccgctttaacgtcgtggttagtggtacgctcgatagttttgatgcgcgccgcatcttcttcgctgaaactggcgacgattgcatcaaggtaaccgattgcgtcggcagcaaaagcaggaacttccttgatcgctgcgtgcgcggccagtttttgcagccaacgtacttcaacttgtacacggaatttcagcaaaccatattcgctgaaaatcccgcgcagcgcgctgactttatcgccgtagcgtccatcgacaggggaaacggcggtcagactggataattccatagatcacaactccggggttaaatgagcaagaatttgttttgcctgagtggtcaggcgattacgagaaaacatcagttgcagacgtccgccgccgacctggtgccagagcacggcggcgcgaatgcctgccagcagggttgcgcgaactttcgcctgcacttgtgggctttgcagtacagcaggggaaccggtgacctgaatgcgcgggccaagcgggctaatcacatcaacatagatagcagccatcgcgctcatcagcgtttcggactgtaaatcgaagtgttcgagctggcgttgcaggccgttgatccggttgcccagagtgtcgagcgcgcctttcgcactggagagtttgcgctcaagcaccatcaagctgagtgtgtagcgggttaattcggcgtttaagccctggcgactgctggcattgagcacgccgagcagggtttccagcccgacgcgcaggttggcttcgctaccgccaaaaaccgccagcgtgctgctggggttcatatcaataatactgttgagactgacgtgtagcgcatcggcatcacaatgcccctggtgagcgagttgttgcaccaggcgtgcgctctgacaaataccggccagggcgagggtgatgtcatagtaattctttgccacgttcactgcttccttgttttaagtaaagataataatcagaccggcagcggcagacgctgctcaataataccgccaccgaggcacacttcaccgttatagaagacggcagactggcccggcgtcacggcggcaaccggttcatcgaaaatcacttcaatgcgatcatcgtccagcgccttgacggtgcaagggatatcggtctggcgatagcgggtttttaccgtgcaacgcatagtgccggtgaatggttcgcgatcgacccagtgcaactgctgggcaatcaacccgacagacatcagccgcgggtgttcatggccctgagcgacaaccagaatgttgttttcgacgtctttgtccaccacataccacggttcttcggtaccttctttggtgccaccgatacccagacctttacgctgaccgagagtgtgatacatcagcccctggtgctcaccaatttcatcgccatcgacggtaatgattttgcccggttgcgccgggagataacggcccaggaactcgcggaatttacgttcgccaatgaagcaaatgccggtagagtcttttttcttcgcggtgaccagaccaagatcttcagcaatcttacgcacctgcggtttttccagttcgccgaccgggaacaggctttgcgcaatctgctcatggctgagcgtataaaggaagtagctctggtctttattgctgtccagaccacgcagcaggcggctcttgccatcgacatcggcccgacgtacgtaatgaccggtagcgatataatcggcacctaaatcttcggcggcaaattcgaggaaggctttaaatttgatctctttgttgcacagaatatccggattcggcgtgcgaccggctttatattcggcaaggaacagttcgaagacgttgtcccagtactcggcagcaaagttaacggtgtgcagttcaatgccgagcttgtcgcagacagcctgggcatcagccagatccgctgccgctgtgcaatattcctcaccgtcgtcttcttcccagttcttcataaacaggccttcgacctgatatccctgttgttgcaacagccaggcagaaacggaggaatcgacaccgccggacatgccgacgattactttttttgcggtttcagacattggatcactcacgacattgaacttcaaggcggcgtattctatcacgcagccttttagatgacaccctttgtaaaaggccagttaaaatcgccaatcatctccagcggataacgttgcccgctttgataacaacgaatactttccgccaccagcgggctacgaagattactcgcctgtaaaatttcttcggcgctgacccaacggcagcagtcgatatcgctgtcatgaggctgggtcgggcatatttgctcaagctcaatggcaaagaggaaacgcaaaaacggcgttttatctggcgcaatccactgatgcatacgaataaagtgttgcggctgcgcgctgatgccggtttcttcccacagttcacgggcggcggcttccactaaggtttcatcggcttccagatgcccggcaggttggttccataacgctttaccattaatcgtctcttcaacgactaaaaatttgccttctgcgtgcaccacgcaagcaacggtaacgtgcggtttaaacattttgcatccttaatctgtcacttctcgccattcaccattggcaagattatccaaagagtaatcacccatcgcatagcgaatcagtcgcagcgtggggaagccaacatgggcggtcatgcggcgcacctggcgattacgtccttcatataaggtgatcttcagccagctggtgggaatacttttgcgttcacgaattggtggattccgcggccataaccacgcgggttcgtcaaccagctccgcgccggcgggcagggtagggccatcatttaaggttacgccattgcgcaaggcttcaagtgcgtcttgtgtgggaataccttccacctgcacataatagatttttccggtgcgtttacccggctgggttaaacgcgcctgcaacgcgccgttattggtcagcaccagcaacccttcgctatcgcggtcaaggcgacctgctgcataaacaccctgaaccgggatgaattcttttaatgttttgcgtccggcttcatcggtgaactgcggaagaacatcgtagggtttattgaacaggatcacacgcgtgggctggttttcaggtttacgcctggtagaacgttggctgctgaatcgcttaacctggtgatttctaaaagaagttttttgcatggtattttcagagattatgaattgccgcattatagcctaataacgcgcatctttcatgacggcaaacaatagggtagtattgacaagccaattacaaatcattaacaaaaaattgctctaaagcatccgtatcgcaggacgcaaacgcatatgcaacgtggtggcagacgagcaaaccagtagcgctcgaaggagaggtgaatggaaagtaaagtagttgttccggcacaaggcaagaagatcaccctgcaaaacggcaaactcaacgttcctgaaaatccgattatcccttacattgaaggtgatggaatcggtgtagatgtaaccccagccatgctgaaagtggtcgacgctgcagtcgagaaagcctataaaggcgagcgtaaaatctcctggatggaaatttacaccggtgaaaaatccacacaggtttatggtcaggacgtctggctgcctgctgaaactcttgatctgattcgtgaatatcgcgttgccattaaaggtccgctgaccactccggttggtggcggtattcgctctctgaacgttgccctgcgccaggaactggatctctacatctgcctgcgtccggtacgttactatcagggcactccaagcccggttaaacaccctgaactgaccgatatggttatcttccgtgaaaacagcgaagacatttatgcgggtatcgaatggaaagcagactctgccgacgccgagaaagtgattaaattcctgcgtgaagagatgggggtgaagaaaattcgcttcccggaacattgtggtatcggtattaagccgtgtagcgaagaaggcaccaaacgtctggttcgtgcagcgatcgaatacgcaattgctaacgatcgtgactctgtgactctggtgcacaaaggcaacatcatgaagttcaccgaaggagcgtttaaagactggggctaccagctggcgcgtgaagagtttggcggtgaactgatcgacggtggcccgtggctgaaagttaaaaacccgaacactggcaaagagatcgtcattaaagacgtgattgctgatgcattcctgcaacagatcctgctgcgtccggctgaatatgatgttatcgcctgtatgaacctgaacggtgactacatttctgacgccctggcagcgcaggttggcggtatcggtatcgcccctggtgcaaacatcggtgacgaatgcgccctgtttgaagccacccacggtactgcgccgaaatatgccggtcaggacaaagtaaatcctggctctattattctctccgctgagatgatgctgcgccacatgggttggaccgaagcggctgacttaattgttaaaggtatggaaggcgcaatcaacgcgaaaaccgtaacctatgacttcgagcgtctgatggatggcgctaaactgctgaaatgtagtgagtttggtgacgcgatcatcgaaaacatgtaatgccgtagtttgttaaatttattaacgggagcgtaacgctcccgttgttttttgttaggctgctaacggttatcaaaattttatcaaaaaaagttatcaaaacccctcggtagttttggggtaggctggccggtcaggtggtagttctactactagtctcccacatagatattccttagctttttattattgctggcggacgctcgttaatatttaaggtcttcattgattaagacatccccaaagttagttatgtattcactgttattaggacaattatgaattaccactccttacacccgctcaaatattgttaaattgccggttttgtatcaactactcacccgggactcgccaggggacagccaacaggcattgggtgcaatcaccttagcgttcaggtacatgcggaatgtaaaaaaggccgcgagcgcggccccttcacatacatctttagtactgagactgtttaacctagggaattattatcgtattatattgcattacaactcccaacagtgacatatgaacttcctgctttactccacgactttaatatttcaaggccatgtgaagaacatatttcttgcactgcgagttcatcgagtaatccatagtaagaaacactttttgaatttttgtaaatgtatccgtaaagatgttttcttcctgtttcgtattttttgaagtatgagcttttatattgatttacaataagagtctcacctcctgattttagtaatctcttgatgctaagaactatcagataattcaaagcgtggctgtgatgataggaattatgttttttacgtgaatgagaataatcttaaatgaggaataactcattgattgacaatatttttattcaagaagtgtcattgactgttaacgcaatgttgtaaaggtaagataatctgatttatcaatattattgtgtgatttttatgtgagcagaagatattcatcagcaacgattacattagtcattttattttgccgacggcctcattgtcgaaagataagcgtacgacagtattatcagaaaagagtgattttttatccaactacacttcagcgcactgcgtgtaaaaaatgcctctttcttatgcgggatatcatcatttcatcatgatgtctttggtgagcggtgaacacaatacacctgcgctgtctcttcaggatgaatcccctggtctggtgcctgcgggctgatgttgcagcagagcttaggagtcttagacgctactatcatttatccaatggcatggaaagcaaaagtgtcgatacccgcagtatatatcgtgaactgggtgcaacgctgagttacaacatgcgcctggggaacggtatggaaatgaaccctggctgaaggcggctgtgcgcaaagaatttgtcgatgataaccgggtgaaggtgaataatgacggtaatttcgtcaatgatttgagcggcagacgtggaatataccaggcagctattaaagccagtttcagcagtacgtttagcggacatctcggggtggggtatagccatggtgccggtgtggaatccccgtggaacgcggtggctggtgtgaactggagcttctgaccatcaacgattaaactgcgcttcggcgcagttttcgtttacaggatgttgaaagggaaaattctggggcaaaaaaagcccgccagttacggcgggaaacctcatcctatgggagaacaatgaataatgaaattgcggggttatcatctcccagtatatccatactaacaataaggttatttactcaaccaggcataaacattttgttttgtgcgtgggaacagccttaaggtgtaaagggggaggtggaaatagcaatgaggagtatcagcaagaatactcgccgctttaccacaacgtggatgagagggatgaaaaactcaaggcagagataactctgccttgaagataaatgcgcttttacagcgggcttatttcagctcttctgcttccggtaaggtcacgttcagctcaagaatagaaatatcgccatctttttgctcaagctgtacggttaccatctcaggatcaatttgtacgtatttacaaatgacctcaagaatatctttacgcaactgcggcagataatgcggttctgcatcgctgcgacggcgttcagcaacaataatctgcagccgttcttttgcaatgttggctgtgtttttcttccggctgagaaagaaatcgagtaatgccataacttatcctccgaacaagcgtttgaggaagcctttcttctcttcttcaatgaagcggaaaggacgttcttctcccaacagacgttctacggtatctgcgtaggctttacccgcatcggcgttaatgtcgagaatgaccggttcaccctggttagaggcgcgcaatacactttgatcctctgggatcacgccgacgagtttgatgcgcaggatctccagcacatcttccatgctcagcatgtcacctctgcttacgcggcctgggttatagcgcgttaacagcaggtgctctttaataggctcttcgccattttctgcgcggcgacttttgctcgccagaatgcctaaaatacggtcagagtcgcgtacactggagacttccgggttggtggtaataatggcttcgtctgcaaaatagagtgccattaacgcaccggtttcaatccctgccggggagtcacaaacgataaattcaaaatccatcgctttcagatcatcaagaactttggcgaccccttcacgggtgagggcatctttatcgcgtgtttggcttgccggcagaatatagagattttcagtacgcttatctttaattaacgcctgatttagcgttgcatcgccctgaatgacgttgacgaaatcgtaaacgacccggcgttcacaacccataatcaggtcgagattacgcaggccgatatcaaaatctatcacgacagttttctttcccttctgggccaaaccagtggcgatggccgcgctggaggttgtcttaccaacaccccctttgccgctagtaacaacaataatgcgtgccatagaaattccttgttaaaaagggatcaatttaacggttgaacggtcaaagcgttttcgactaactgcagtcgcgccgctttgccataaaattctgctgggatttgatcactcagccagtattcacctgcgatggacaccagttccgccatcaggttcgtacaaaatatttgcgtttcccggtcaccacttgcccctgccagcgcacgaccgcgcatcatgccatagacatgaatgttcccatcggcaatcaattcggccccagcgctaacgtggcttgtaacaatcagatcacattgtggagcataaatacgctgaccggaacgcaccggggtatctattaaacgcgtttttgtgaccggcgttgtattttgcgctggagcctgcggtgtgggagctggacgtggcgctttttcctttccttccgtcaggataggcagccccatcttttcaatttcggctttaagttgcgcatctttgcagccacttacgccaataacccgcaaaccggttgcgctaaccgccttatgcatcgcactccagtttaccgggtcttccagtgcactgacgttgagtacaacgggggcatgttttaaaaatgcgggggcctgagcgattttgtcttccagcgcctgatggataaccttaggttctgcctcatgcagatgaaccacagataaagtgaagctactgcctttaagctcgattggcgtgttactcatcctggccttactcaattagctattaatcatcgccagcgcgcgatgatgttccgaagactataaggcatgttatagtctggattatattgaggcaagtcaccctcccatttattcagagtaaaagtctattctgtgataaatggcgctgattcatagcttaaaaaatacccttgtcaatcaacccattgccgtcgtacttttgattgttcttatttacgcttcctttttccgcaccctaatcgtgacagcatctccagacctgtttaaatatccagtattgaggcaagtgtattttttcaccacgccaggctttcttaactttccattttttgcggcatcattaaagaacagatacccgttatcttaatatccgccacagaattgctctatcatagaaaccgcagaagacgtctgatacttctgtcaggtcatcgtaactcgtccaggtcagcggttttgattacggattgatgatgaaatgagcataagtgttgtacggttggattatcaggatgtgctatgaatatgatgcgtattttttatatcggattgagtggtgtggggatgatgttcagtagtatggcgtctggaaatgacgctggcggacttcaatctccggcgtgcggcgttgtttgcgacccgtatatttgtgtgaacagtgatggcatttccccagagttaacaaggaaatatctcggcgaaaaagccgctgaaaacttacaaagtttacaaggctacgatcccagcgaatttacattcgctaacggtgtattttgcgatgttaaagaaaaattatgtcgtgatgatcgttattttggtgtggatggtaagcggagtggaaaaatcaatcaaaccaccacaaagatgttatttatgtgtcgtgagtgatgtcttgtttacattatgttctattcgtcattaacctcttgagcgacagagaggagtggggcattaacgtttatgacggggagagtccccgtcggttgacatttacttaatttgaatatcgacgttatattttttagttttgtttttacgggcgtcgtttcgggtttgcaacactcgcagctcatatttgccagaagcagggagactgtattgtccgtgactatcgagttctggggaatatctggataaatcaacactatcatcgattcctggcccgaagaggtaagtatcagcgccttcattagagatactcacatgcactttctgaccttttttggcatagaaggtatatgtatcgtaatcgtatccctttatttcgccggagtactgagcgctgctatggccttttctgaactcaacattgacattcttacccgcagcaaagctcgtggaggttagcagtgcaagcagcaatacagccttcctgatgctcttgattttcattggtagtctcctgttcagaatgagtacgatgaactgttataatataacaatccctaacgggagaattccagtggctttcctgcgttcggtaaaatcacgttgcggcatttttgccggggggattacttataaagggggcatggactcaacaaaccgtagaaatctacagctggctggcttgtggcgcgggtttcattgatgttagcttatgccaaaacctggcatcttaaagagtaaaagtatgttttgtgtgatttatcgaagcagcaagcgtgaccagacctatttatatgtcgaaaaaaaagacgattttagccgtgttcctgaggaactgatgaaaggttttggtcagcctcagttagcgatgattctgccgctggatgggcggaagaaactggtcaatgccgatattgaaaaggttaaacaggcattaaccgagcaaggttactatttgcagttaccgccaccacccgaagatttgctgaagcaacatctttccgtcatggggcagaaaacagacgacactaacaaataaccgatatccggcggtggcattatctttgtcggcgcgggttttcatatccacgataaggtgaggggaacgttatgtatcaacatcacaactggcaaggtgcgctgctggattatccggtgagtaaagtagtctgtgttggcagtaactatgccaaacatattaaagagatgggcagcgcagtgcccgaagagccagtgctgtttattaaaccagaaacggcactgtgcgatctgcggcagccattggcgatcccatccgatttcggtagtgttcatcatgaagtcgaactggcggtgttgattggcgcgacactgcgtcaggctacggaagagcatgtccgcaaagccattgccggttatggcgtggcgctcgatctgacattgcgtgatgttcagggaaaaatgaagaaagccgggcagccgtgggaaaaggctaaagcgtttgataactcttgtccgctttccgggtttattcccgcggcggaatttaccggcgacccgcaaaatacaacgctgagcctgagcgtaaacggcgaacaacgccagcaaggtacgactgcggacatgatccataaaatcgttccgctgatcgcttatatgagcaagttttttaccctcaaggccggtgacgttgtgttgacaggcacgcctgatggcgtcggcccgttgcaaagcggtgatgagctgacagtcactttcgatgggcattctttgacaactcgcgttttgtaatactttttgccgcctgaaagcggcggcaaaacttgcatcgctgtgccagactggttataaggtgcgttttaacgtaatggcggaacacctgatgagcgatgtacctttctggcaaagtaaaaccctggacgaaatgagcgatgcggaatgggagagcttgtgtgatggttgcggtcagtgttgcctgcataaactgatggatgaagacaccgacgaaatctacttcactaacgtcgcctgtcgccagctcaatattaaaacctgtcaatgtcggaactacgaacgtcgtttcgagtttgaacccgactgcattaaattaacccgtgaaaatctgccaacattcgaatggctgccaatgacctgcgcttatcgtttgctggcggaaggtaaagatttacctgcgtggcatccgctacttactggtagcaaagcggcaatgcatggtgaacgtatctctgtgcgtcatatcgcagtgaaagaaagtgaagtgattgactggcaggatcatatcttaaataaacctgactgggcgcagtgataaatttaatagatgctgatgggggctttcttaatatacgtctggatgctcgccatttcgtagccctgtttttgaaagcgctctgtcataatgagagttacccgataccttattatcaacaggtaactctcaatctttaaaaaacgtctgtgtttttaaatgtgataaaccttataccttgagtacatggagagaataatcgcttatcagacttcaggtacctcaaagagtgtctttttaccgtgtcttttctgatactcattacaggtgttaatcatttttttggccgcttcttttagcaaagaaagcattaaatcatcataatcaacgtagaatctggttgtttcagtttccgtttttatctcaccgatggcggctatttcggtggttaatttcaatttggcggcatcgatatctttattcgcttgtttaaccgtgttagacagggtggtaaagaaattctgcacagattttaacttgttcttcaattctggaatcagttttccttcaactacgcccgcagcaatagaataggaaatgattaatccaaatggaccggcgacgacaccggctgcggcaccggcatatgcttccttcctgattttatctacctgactctggaaatagctgcttttttcactaaaatcattggttaactggctatctaacgccagcagtttcccggaagcgttgttgaaactttgactgcttaccagcagggatttttgcgcttcattcagcttcgtgatgccgtcatccagtaccttaatgagaatgtctttctgggcggatgctttcttctcattgtactcatcaaatagcaaaatatacgctgcgagcaattgcgtcgcaacaccacaccattcatacactgtttgggttgcttcaaaatacttatcctggctatccataagtaaggttttaatatcgccgactaaaacggaggctgcctgactatactcctgtttaaagcgacttaactcttttatggtttcatcaaaggtctgccaggggatgacctgatcgagatatttattataaagatctaatgctccatctgcggtttcgattgcgtttttaactacttctaccgttttatctgcaacgatttcagtcataatcattcgcctctttaaatatataaattgtaatgaaactcctgttttacaactattaataaattttacttcatctaattcatagttagccgggcgggatgcgtcaatgtctttatttctattaatatgataaatatcaaacaatgtttaatgtcattatggcgaatgcttctattctattttttagccgggtgatatttttcatttctgctggatgagcgtcgtcgccagaaggccacgtgagcacaagataagagaacgaaaaatcagcagcctatgcagcgacaaatattgatagcctgaatcagtattgatctgctggcaagaacagactactgtatataaaaacagtataacttcaggcagattattatgttgtttatcaagcctgcggatctccgcgaaattgtgacttttccgctatttagcgatcttgttcagtgtggctttcctagtccggcagcagattacgttgaacagcgcatcgatctgaatcaactgttgatccagcatcccagcgcgacttacttcgtcaaagcaagtggtgattctatgattgatggtggaattagtgacggtgatttactgattgtcgatagcgctattaccgccagccatggtgatattgtcatcgctgctgttgacggcgagtttacggtgaaaaaattgcaactacgcccgacggtacagcttattcccatgaacagcgcgtacagccccattaccatcagtagtgaagatacgctggatgtctttggtgtggtgatccacgtcgttaaggcgatgcgctgatgtttgccctctgtgatgtaaacgcgttttatgccagctgtgagacggtgtttcgccctgatttatggggtaaaccggtggttgtgctaagcaataatgacggttgcgttatcgcccgaaacgctgaggcaaaggcgcttggcgttaaaatgggcgatccctggttcaaacaaaaagatctgtttcgtcgctgtggcgtggtttgctttagcagcaattatgagctttacgcagacatgagcaatcgggtgatgagcacgctggaagagctaagcccccgcgtcgagatttacagtattgatgaggcattctgcgatctgacaggtgtgcgtaattgtcgcgatctgactgattttggcagagaaattcgcgcaacggtgctacaacgtacccatcttactgttggtgtggggatcgcccagaccaaaacgctggctaagcttgccaatcatgcggcaaaaaaatggcagcggcagacgggtggggtggtggatttaagtaatctggaacgccagcgtaaattaatgtctgctctccccgtggatgacgtctgggggattggacggcggatcagcaaaaaactggacgcgatggggatcaaaaccgttctcgatttggcggatacagatatccggtttatccgtaaacattttaatgtcgtgctcgaaagaacggtgcgtgaactgcgcggcgaaccctgtttgcaactggaagagtttgcaccgacgaagcaggaaattatctgttcccgcagctttggtgaacgcatcacggattatccgagcatgcggcaggccatttgtagttacgctgcccgggcggcggaaaaacttcgcagcgagcatcaatattgtcggtttatctccacgtttattaagacgagtccatttgcgctcaatgaaccttattacggcaatagcgcgagcgtaaaactgctgacgcccactcaggacagcagggatatcattaacgctgctacgcgatctctggatgccatctggcaagcgggccatcgttaccaaaaagcgggcgtgatgctgggggatttcttcagtcagggagtcgcgcagctcaatttattcgatgacaacgcaccgcgccccgggagtgagcaattgatgacggtaatggatacactgaatgctaaagagggcagaggaacactctattttgccgggcaggggatccagcaacaatggcagatgaagcgagccatgcttagtccacgttatacaacgcgaagttctgatttactgagggtcaaataaatatagcggcaggaaaaaagcgctcccgcaggagcgccgaatggattagcgaccgaacagatcacgttttttcgctttaaacggctgggaaatcaccaccagcactgcgacaatcaggtaagcgataaaaataccgagcagccactgcggcatttccagacctaaaaaatcccactgacgctcggcgcaatcgccagaggcgacaaacacttgcggcacccacttatccagcggcagccattccgggaaacgaaccataaaatcacaggtggcaaacgggctaggatagagctgaagcatggtgtgctcgtaagttaactgcacaccgcggaacgcactatacaaccagataaccatcgctacataacgcagcggagttttcggggcgatcgcgccaatcagcgcagcacccagaacgccgaataacgcgcagcgttcataaatacagagcacgcaaggtttcagtaacatcacatgctggaaccacagcgccgtcagttccagtgccagagcagtaaacgccatcaacagccacgcgccccggccttgactacattggttcaaaaatcgcaacataatcatttccctgcaatatgcatagagtgcgcagtttaaaccaattcattcgctgcgccaccaggaggcagcaaaaataggacgcaattggacaattatcgggcgaaaaggcaaaccgggcatttatatgcccggtaagttgttatcaaagcgttgctatccagcccatttgcataaaccattcggttacaggggcaagcgtaaactcgacgcagagcaagccgacgagtgtcaggacgagggtgtaaggcagggccatccacaccatgcggccataagagaggcgaatcaatggcgcgagtgcagaggtcagcaggaacaggaacgcagcctgaccgttcggcgtagcgacggagggcagattggtaccggtattaatggcgaccgccagcagctcgtattgcttcaacgtgatagcgccactttccattgccgctttcgcttcgttgatataaatcgtccccacgaagacgttatcgctaatggaactcagcagaccgttgaaaatatagaacaggctcagctgagcatgttcgcttgcctgcaacacaaactgaataattgggctaaacagttgttggtcgataatcaccgcgactacgctgaaaaacaccgtcaacagtgcggtgaatggcagagattcggtgaaggctttaccgatagcatgctcatcggtgacaccggtcaaacttgttgccagaataatgacactcaaaccaatcaagccaacttccgccagatgcaacgccagcgcagtcaccagccagacgccaataatcgcctggacaatcagacggattttatcctgacgggtacgctggtggcggctttgatcgtcaaactgttgcaacacttcgcggactttctccggcagcgtttcaccgtagccaaaccaacgcagcttctctaccagcaggcaggttaacaggccacaaatcagaaccggaacggtcaccgggctcatgcgcaggaagaaatcgccaaaatgccagccagccgctttagcgatgatcaggttctgtggttcgcccaccatggtcattacgccgcctaatgcggtgccgacaccggcatgcatcatcaggctacgcagaaagccacggaactgttccagaaccactttgtaatgcttgtcgatatgactatcgtcttgcaggtcggtgtcttcggtacgggaagaggctacgcggtgataaataccataaaaaccgactgcaacgctgatcaccaccgccacgacggttaaggcatcgaggaacgcggagaggaacgcagccgccacgcaaaaagagaggctcagcagcattttggagcgaatgcttaacagcaaacgggtaaatatgaacagcaacagctgtttcataaaatagatacccgccaccataaacatcagtaacagcaagacttcaagatttgccgccacctcttcacggacgtgttccgcgctggtcatgccgatgaataccgcttcgatagccaacagaccaccggggagcagcgggtagcatttcagggccatcgccagagtgaaaataaattccgctaccagcaaccagcccgcgacgaaagggctgatgaggaaaattaacgggtttacgattaagaaaatgatgagggcgagtttgtaccagtcgggggactggcccaaaaaattgcgccatagcgcgcggccccaggagatctccatgatggtttcccttaccttacaaataatcaatgatgtttttatgtttaaacgcaaagcttaacggtcaggcaggagtgaggcaagtcttgatagtcaaggggaaagagatgcggaaaatgaagccttgatccctttttcttctttttgtctgctatcagcgtagttagccctctggtatgatgagtccaactttgttttgctgtgttatggaaatctcactatggtcattaaggcgcaaagcccggcgggtttcgcggaagagtacattattgaaagtatctggaataaccgcttccctcccgggactattttgcccgcagaacgtgaacttagtgaattaattggcgtaacgcgtactacgttacgtgaagtgttacagcgtctggcacgagatggctggttgaccattcaacatggcaagccgacgaaggtgaataatttctgggaaacttccggtttaaatatccttgaaacactggcgcgactggatcacgaaagtgtgccgcagcttattgataatttgctgagcgtgcgtaccaatatttccactatttttattcgcaccgcgtttcgtcagcatcccgataaagcgcaggaagtgctggctaccgctaatgaagtggccgatcacgccgatgcctttgccgagctggattacaacatattccgcggcctggcgtttgcttccggcaacccgatttacggtctgattcttaacgggatgaaagggctgtatacgcgtattggtcgtcactatttcgccaatccggaagcgcgcagtctggcgctgggcttctaccacaaactgagcgcgttgtgcagtgaaggcgcgcacgatcaggtgtacgaaacagtgcgtcgctatgggcatgagagtggcgagatttggcaccggatgcagaaaaatctgccgggtgatttagccattcaggggcgataatcccttccgtttaaagagcaaacccctcaaacgaggggttttttgttgtttttacagatttcccattcttggcgggcaacgttccagcaactcgatgctgccgtcttcgttttgctgttcgagcatcacatcaaatccccacaggcgatgcacatgcttcaggacttctttgcgcccccgatccagcggtgcgcgattatgtggaatataacgcagcgtcaggctacggtcgccgcgcaaatccacgttccagatctgaatattcggctccagattacttaagttatattggctgcttaaccggttacggatctcccgataaccttcttcattatgaatagcggaaatctccagataattatgccgatcgtcatccagcacggtgaagaagcggaaatcacgcatcactttcggactcaggaactggctgataaaactctcatctttgaaatcacgcatcgcgaaatgcagcgtttccagccagtcggaaccggcgatatccgggaaccagtatttgtcttcttccgttgggctctgacaaatccgtttaatatcctggaacatggcgaacccgagggcatacgggttgatgccgctgtaccacgggctgttataggggggctggaagaccacattggtgtggctgtgcaaaaactccagcataaaacgttccgttactttcccttcatcatacagatggttaaggatggtgtagtgccagaaggtcgcccagccttcgttcatcacctgagtctgtttttgcggataaaaatactggctcaccttacgcacaatacgcaggatttcacgctgccaactttccagcagtggcgcatttttctccataaaatagagcaggttttcttgtggttcggacggatagcggcgcgcttcagcaaccgttttctcttcctcgcgcttcggcagggtacgccagagcatattgacctgactttgcagatactcttcgcgacttttctgccgggctttctcttcttgcaggctgattttttgcgggcgtttgtaccggtccacgccgtagttcatcagcgcgtggcagctgtccagaagccgttctacttcatcaacgccataacgctcttcgcactcggtaatatatttacgggcaaaaatcagataatcgacaatgctactggcgtcggtccagctacggaataagtaattgtttttgaagaaagagttatgcccatagcaggcatgagccatcaccagcgcttgcatggtaatggtgttctcttccatcaggtaagcgatacacgggttagagttaatgacgatttcataggccagtccttgctgaccgtgcttatacagccgttcagtctcgataaactttttaccgaaactccagtgcggatagttaattggcatgccgacgctggagtaggcatccatcatctgttcactggttatcacttcaatctggtgcgggtaggtatccagccggtagagtttcgccacccggtctatctctgccagataaacatccagcaggtcgaacgtccagtcgggtccatcgctcaaacgtgtggtgtccttattcatagaatcgatcgtcgccatacgcgcacctcattgttgtcggcgctctctgtgtggagcacctcatttcaagcatagaacacctgttaaaaaccgcgtcgccggagaatttttttctttgcgatttcttattatcagagtgccactaatccgcttctgaacggaattttatgctggataaaaagggcgttcagcaggagatactaaagacgccatattgccgcagagtcagggagatgtgagccagctcaccataaaaaagccgcatgttgaataatattttcaactgagttatcaagatgtgattagattattattcttttactgtatctaccgttatcggagtggctatgcgagttgtcatactgggaagtggtgtggtaggcgttgccagcgcctggtacttaaatcaggcaggacatgaggtcaccgtcattgatcgggagccgggggccgccctggaaaccagtgccgcgaatgccgggcaaatctcccccggatatgctgcaccgtgggcggcaccaggtgtgcctttaaaagcgattaaatggatgttccagcgccatgcgccgctggcggttcgtctcgacggtacgcagttccagttgaaatggatgtggcaaatgttacgtaactgcgacaccagccactacatggaaaacaaagggcggatggtgcgtctggcggaatacagccgtgattgcctgaaagcattgcgcgccgaaaccaatattcagtatgaagggcgtcagggtgggacgctgcaactgttccgtaccgaacaacagtatgaaaatgcgacccgcgatatcgccgtgctggaagatgccggcgtaccgtatcagctgctggaatccagccgcctggcggaagtggagcccgcgctggcagaagtggcgcacaaactgacgggcggcctgcagttacccaatgatgaaaccggagactgtcagctatttacccagaatctggcgcggatggcggagcaggcgggggttaaattccgctttaatacgcccgttgaccaactgctttgcgacggcgagcaaatctacggcgtgaagtgtggcgatgaagtgattaaggccgatgcgtatgtgatggcgtttggttcttacagcacggcgatgctcaaaggcattgttgatattccggtgtatccgctgaaaggctacagcctgaccattccaattgcgcaggaagatggtgcgccggtatccaccattcttgatgaaacctacaaaatcgccattacccgtttcgataaccgcattcgtgttggcggaatggcggagattgttggttttaataccgagctgttgcaaccgcgtcgtgaaacgctggagatggtggttcgcgatctctatccacgcggcggtcatgtcgagcaggcgactttctggactggtctgcgcccgatgacgccagacggcacgccggttgtcgggcgtacacgctttaaaaatctgtggctgaataccggtcacggcacgctcggctggacgatggcttgcggttccggtcagttgttaagcgatctgctctctggtcgcacgccagcgatcccatatgaggatctaagcgtagcgcgctacagccgtggatttacgccaagtcgtccgggccatttacatggcgcacacagctaaggaaacgagatgacccgtccgatacaggccagcctcgatctgcaggcattaaaacagaatctgtccattgtccgccaggccgcgacgcacgcgcgcgtctggagcgtggtaaaagcgaacgcttacgggcatggtattgagcgtatctggagcgcgatcggggccaccgatggctttgcattgcttaacctggaagaggcaataacgttacgtgagcgcggctggaaaggaccgatcctgatgctggaaggatttttccatgctcaggatctggagatttatgaccagcaccgcctgaccacctgcgtacacagcaactggcagctcaaagcactgcaaaatgcgcggctaaaagcaccgttggatatttatcttaaagtgaacagtgggatgaatcggttgggcttccagcccgatcgcgtgcttaccgtctggcagcagttgcgggcaatggcgaatgttggcgaaatgaccctgatgagccattttgccgaagcggaacatcctgatggaatttccggcgcgatggcgcgtattgagcaggcggcggaggggctggagtgtcggcgtagcttgtccaatagcgcggcgactctgtggcacccggaagcgcattttgactgggttcggcctggcattattttgtatggcgctagcccgtccggtcagtggcgtgatatcgccaataccggattacgtccggtgatgacgctaagcagtgagattattggtgtccagacgctaaaagcgggcgagcgtgtgggctacggcggtcgctatactgcgcgcgatgaacagcgaatcggcattgtcgccgcagggtacgccgacggttatccgcgccacgcgcctaccggtacccctgttttagtggacggcgtgcgcaccatgacggtggggaccgtcagcatggatatgctagcggtcgatttaacgccttgcccgcaggcgggtattggtacgccggttgagctgtggggcaaggagatcaaaattgatgatgtcgccgccgctgccggaacggtgggctatgagttgatgtgcgcgctggcgctacgcgtcccggttgtgacggtgtaacttgttgtaagccggatcggaggcaacgtcttctgggtgcaaaaaaatcatccatccggctggtcagcaactgtagttgttaatgtgacagagccattgcccatgatagtgtccattaaaaggatggacactatttccccggaacctgaactcaccgcacaggcgttctacataaaacgcttacgcttcattgttgactcgaactcgacttcagataaatcacgctttacccttgatggagcctgtacatagatttgtgtaattgcctgattttgatatgttcaattcaacatcaaatgaaggttaaattatggacgacaaacaattgcaggctcaggctgcgttcagcaaagcatcgcaaccggcgatagatgcttcattaaatttaagattcagcttcctcttcagccacccgtacgccaatcttcaacacttcattatcttctttctcggccaccgtccagatcatcccggcaaactctacctggtcaccgacaaccggtgccgcgcctaacaactgctggacaatttcacccagcgtttgctgcttatcacgatattctcgcccgtcttccaggccatatatcagcgcaacatcagcatatttggcgctggcttcgagaatgaagtcaccaaagaagcgttgatccagcgcgaccggcgggctctggctgaacagtttaccgagcgccggaagatcgcgttcccgaccaattacacacaacacatcgccttcgcgcagtcgggtgctgccggtaggatgaagcaactggttatcacgaaacagtgccgcaatacgcgtctcttttggcatatgcaaatcgcgcagtgccgcgcccacgcaccatttatcggcactcaattgataaacaaactgctcccacggattttccggatgaatatccaggccaacgcgactcaccggacgtcccactggcggaaccaccactttggcttttttagccgcccagctgagacttgttccctgcaagagcagactaaccagaaccacaaagaaggcgacattaaagaacagacgtgcattctccagccccgccatcatcgggaacacggccaggatgattggcaccgcgccgcgtaatcctacccagctgataaacacgcgctcacgcagattgaaaccgcggaaggggagcaatccagcaaatacgctaaggggacgggcgaagaatatcatccatgcggacaaaatgagcgccggaatggcaataggcagcagatcgcttgggttaaccaacagccccagcaccaggaacatggcgatttgcgccagccaggcgaggccgtcgaaattttgcaggatgccgtagcggttgcgaatagggcgattacccagcagaaaaccgcacagatacaccgccagaataccgctaccttccagcgcagtagttaaactgaaaatcagaataccgccacttaatgccagcaatggatataatccggcgggcagggcgatgcggttgatcatttgcagtagtaaataaccgccgccaagacctattacaatgcccagaccaaattgttgcagaatatcgacaatgaacatccagctaatattgctctcatgatgctggatcatcgcaattagggtaatcgtcagaaagaccgccattggatcattactgccggattcaatttccagcgtgctgccaacacgttcgttaagccccttaccacccagcagagaaaagaccgctgcagcatcggtagagccgacgatagcgccgattaataagccttcaatcaaatcaagattaaacagccacgccgccatcatgccggttaaaccagaggtgataagcacgcccagcgtcgccaggctcagtgccggtcctaacgccacacgaaaggaactggcctgagtgcgcatcccgccgtcgagcaaaataatcgccagtgccaggttacttaccatgtaggcgaaggggtaattatcaaacgggataccgccgacgccatcgactcctgccagcatgccgatcgccagaaaaataaccagaataggaatgccaagacgggaagaaaaactactaagtaatatactgctggtgacaaggatggatcctaagatgaaaaggctaattattgttgtggcatccaacggtcggttactcctgattacgctgtctcttatataaaccctaccatattagcggcagagacagcgttttacttagccctgaagcgtgatttttttacattttaagaacaggatgaccgctaatcgtcaactgagtgccttcccgggtgttattcagaatggcatgtgcgcccaacggcagcgtaaccgtgcgttgttcatgaccaaaatcgaggccggtaatgagtggaatgctcaggcgggaacgcaaaaacgcgtacacactctccaggttgtaacctgcgtcataatcattgggcgtgctgccgctaaagctaccgagaataatcgccttctgacgtggcaaaattcccgcatgatagagctgcaacagcatacgttcgacccggaaagggtgctcgttaatatcttccagcaccagaataccgttctcaatttttggcatccacggtgtaccgatcagactaatcagcatcgcaagattgcctccccacaacgtgccttcggcccgacatgtcgggccttccccttgccattcaatggtgaaggtttcattgcgtaacgccagccagaaatggtgctcggtaaaggcgttcagttcatccgcgccaaagtttgctaccagcatggggccgctaaaggtgatgacattgccatgcgccagaagaccgcactgaatggcggtaaaatcgctatgtccgcaaatgagcaacgggtcatgttgttggcgagccaccagtgcctgccagtcaatatctgccagtaaacgactggcaccgtaaccgccgcgtacagccagcacgatggtgttgggggtagtcagtctggcaagggaattgagatcttccagacgctctgtttccgtacccgcaaaacgctcacaacgacgggcaataacctcgacgttattgacttgatgccccgcgtcggtaaggcgctggataccacgcagcgcggcgtgctgtttaatgcagtaaccgcttggggcaattaagtgaaacagagacatggcaattccttgctgacaacagaaacgaaatgtatatcatgccgcttaggtgtgccgttgtcacctcaacggcgattccaggctataaggatagaagaagtgaaattgagatggtttgcctttttgattgtgttattagcgggttgtagtagtaagcatgactatacgaacccgccgtggaacgcgaaagttccggtgcaacgtgcgatgcagtggatgccaataagccagaaagccggtgcagcctggggcgtcgatccacaattgatcacggcgattatcgctatcgaaagcggtggtaatccgaacgcggtgagtaaaagcaatgccattggtttgatgcagttaaaagctagtacctccggacgtgatgtttatcgccgtatgggctggagtggtgagccgacgaccagcgagctgaaaaatccagagcgtaatattagtatgggggcggcttacctgaatattctggaaaccggcccgctggcaggcattgaagatccgaaggtactgcaatatgcgctggtggtgagttacgctaacggggcaggtgcgctgctacggactttcagcagtgatcggaaaaaggcgatcagcaaaatcaacgatttggatgctgacgagttcctcgaacacgtagcgcgaaatcaccctgcgccgcaggctccgcgctatatctacaaacttgagcaggcactggacgcgatgtaaatcagtcgcgcactttgtccgctttttcccgggcttctcgctcgagagagaaaataatccgctgtaattgccgctccaccgtcgggctgacgttaagaaaacggaagctcagacggggagtggtgatggtttcattcttgccatcaatcactttgcgctcgctgatggagattaactgggcgtcaaagtgaaaaacaccccattgccccatgttgacttcaatctgagcgaagcgcatgccttcttgtaattcggcaggctttgctgtttccagtaatgcgcccatgccgcctaagctcaaatcatacaggcggaaacgtaacgtactgttatccgccagtttggtctggcaaaaataaggcggatggagtggggcggagatgcggaaatatcggcgtcgttgtacaaaccataaggtgggaggcggtacggtaataaatgccggaagctgcaagtattcactctgctgtagttgttcaacagtaaactcgactttcgcaccctgagtttcggcggtaatggtaatgtgctgtgcctttagcacggcgatgttgtcttcggcttgactgccgaaatccagcaccagtttatccggggttattgccagtaatttgctgatcagctgcccgccattccaactgagacgcaaaggaattgcggctttgtgcaaatcgcgtaacacgcccaggacggctaacggattttgtttcaggaactgctcatggtaatgactcacgcggaaaaactcctgactgacaaactgtctttggtttatcggtcacagttaacaaaacttaatacaaatgcgtgaatattttttacatgttgttcttaaatcagccgacatacgcccagcatcgatcccgcccttgcctatacttagagcgttgatgtaagcatttcttgcgtccgattcatcgaaacgagggcctgaacatgggaattattgcctggattatttttgacctgatagccggcattatcgccaagctaatcatgccggggcgtgatggtggtggatttttcctgacctgtattctcgggatagtcggtgcggtggtcggcggctggctggcgaccatgtttggcattggcggctccatcagtggttttaatctgcacagcttcctggtggcggtggtgggagctattctcgttctgggcatattccgcctcctgcgaagagaataagattttcataaggcggatagcgatacagatgccgctatccgctttcacatcagaacgtatactcgacacctgctttacgggtgaaaaaaatcaatatagcacttcgatatccgataaagtcggttcccggtaacaacaacagaatccttttttaattattgtttcgttgtttttggtgtgattcagaaaataaatattttagacagtagccagagtggcgttaaaaatggggcggatagtgaggcggttttggctgcgcttattgaacatttagaattgatcaatccttctggcagattaagccaaaatacccgtagcgcaatgcttcagttacgcgaagaggaatggtctgaattctttttttggttgctaaattctctggagtgtctggattatgtgattattaatttaactccagaaagcaaaaaaacgttgatgagtgaacaccgtaacaatattcaggtagcaattgatgctttatatagccaacgtcggcgtaaaagcccgggtgatgaaagtgaaacacttacccgtagaaatgacgctatcttcggcaaccacgtatggcaaacatttgcgcaatacttcccgccaggacttgaaaaaccgtctgtgtaaaaaaaaccatagctatggtgttatctgccgacaacgccatccggagaagccgaatgacgttgtcggagtaagcgctggttaaggtgtgggttgtgcctctttggtactgggttgcgtcgttgcactcttaacggtcggacgcgtcgccggaacattgtcacacggttgctctttcgggcagatcaaatccagcattttcagcgtcacgccattggtccagccaaagccatcctgtaatggatattcgccaccgccgccccccgttccggtggtgctgacatcatatttttccaccagctttttctcccggtcataggtgtgctgaacattggtcaggaagtgccagctaatgtccatcgccacctctttttgcccgtagttttgtaatccttctgtcgcgacccactgtaacggtgcccagccatttggcgcatcccattgttgcccacttttcacgctcgtggtgttcaggccgccgggttgcagcagatgtgttttcgtcgccgtcgccattttgttggcgcgatctttcgctgccgcattgacgtacagcgggaacagggcggccgcggttaactgattgcgcactttatgacttttcaggtcgtaatcggcataccagccttgttgatcgttccacaggtatttttcgatccctttttgacgggcatttgccagcgtttcgtactggtttgccatcgcgttatctccggcagctttgctggcgcgggcgaggattttttccattttaaacatcaggctgttcagatcgaccggtacgatgctggtggtgcgtaaggtatttaactgctgcgggttgtccatccagcggctgctgaaatcccagccagacgcagcggcagagcgcaggtcgcggtaaatttcagtggcaggtcgattcggattgcttttggcggtggcaatatcttccacccaactctctggtcgtggcgtatcgcgatcgtcccagtagcggttgagaagggtaccatcctgaagtttgacaacgcgtttttcctgttgtccggcttgcaggttttcaacaccgtccatccagtaagcatattctttttgcatttgcggcaggtattgcttcaacgcggcatcgccttcatgctgcgccagtaactctaccatcagggcaaagaagggcggttggctgcggcttaaatagtaactgcggttgccgttgggaatatgaccgtaagtgtctatttcatgagcaaaattggccaccatatccgcgactttatcccagtgaccgctttcggcaagtcctaacatggtgaagtaactgtcccagtaatatacctcgcgaaagcgtccgcccggcacgacataaggttccggcagcggtaacagagaatcccatttttcggtgttttcggtagaacgcgttaataccggccaaagtccgtcaatatgttcgcgcagactctgcccctctggcggaacatatttctcgccttctttcggcagggtgaaattgacgttaacgaaatggcgcagatcaaatccgctctggttttgctgcatccgataatcagcaaggatcatcagcggatcgctgttcggcacggcatcggcaaaggttttttggtccggaaaaagtttggcgttttgcacatcattaaacagcggccctaataaaatatcaggcggctgtggtgttaccggtgtttcttctgcctgcacgcttagcgcagcgaaacacaaaaagatacaggctggaattaacgccattttttgcgggcgagaaggtgcgggggatttcatcaatcattctcctttggcgaaaccgaataaaacggtattcaagtatcagaaaaccttagttcaggatcgcactagctgcatgatcgaaatctcattctgcgaactgtcaggcattttagaaaagggaattaaagggataaataacggcgaaatagagtgatcaaataacgtctgtttattagccagccagcggcgttgggttcgtgattagcgaagaaaaatcatcataaattggtgaaaaatataacaggtagttaaaaaccattagtgctgagtaaattgccggatgacatcagaacgatgccatccgaacagtggcttaaccctgacggttgaaacgttgcgttttaacgtccagcgttagcgtttcttctggttgtatcgcatacagtttctcaccctgctggcaaatccagccaatccccagttcacgggcgattagggcgctgtgggataccggacttccggcgctaaggcagataccttttacaaccgccggatccagttgcagtactgtggaaggataaatgttctccgccagtagaatagttgggctgttaaactgcgggagttcttctttcgtttgggtcaggtggaccagggtgcgatgcagaagatcgtccacatcaatatagcgagcttgtagatattcatcatccagttgctggtattgctggctaagttctttaagaacttgctgccaggcatattctgccgtgcaatgttcatgctgaaggagttcgcttgccgccgccagcagttccggatcatctaacagtgtatggtgaccagaaaagattgcggcaatatcgtcaagcccgctggcttctgctttcgctgttaacgtcatcagatctaataacgtgaagtcaatagcctggcgtaatcgatcttgttcttcttccacggtcagggtactttttgcctgtaccgtacataaaactggttgataataaaaggctttaccgctaacaggcggaacgggacgcagagtaggtggagcgacttcctccgtttcaccaaagttatcttcagccagctgacggaaagcgatcagtgcctcttcagcttctggccctttcgcaatcaggcgcagcgtatcgttatagcgaacttgtagtaacgcaatctggttaatactctctggtgtgacgcatttgccgtttttttccagcaacatatcggcattaaatgtgcttaaggtataaaccagccgggaggccggacgtacatgcaggccgttacggttttttatgaccaccgccagagaacgggcttcttcatcgtacgcaggacatgtgtcagagatttcagtgtcggaggacggtaaacccagttgttcacgtttggcttccagcgcatgcatggcgtcaaagataactttgtcgatatccgccccgctggccgcgctgaccgttgctgccagtgtaccttcgaccaacggcgcagcacacaaacgtacttttgcggcgatctcgggagccagcaattccagcgcagtttcagcactcaataatgcgctacccatatccatcatgaccagcacatggtcggcatcagcaacagattcgatggcctccatcactttgacggcatcggtaccaatgggattttgtggatcgtcaattcccgcggcaatggcgattttacaactatcactcattaacatctgacgggctaattcaccgacaccttctcccagtcggctgctatgactaactatgaccaggtttaccatcaccaattccttactcttttgcggctaacgccaacatttgcatcataaacatcacgctggtcgcgccgggatcctggtgaccaatactgcgttcaccgagataactggcgcggcctttgcgggcttgcatcgtaatcgtactttgtgcagcggattcggcgatgctactggcagcttcgagcgccaccggaacagagagattttgctcgctggactgacgtaagctttccaccaccggcacccacacatcacacatggttttatcgccaggttcggctttcccgcgactgattacgccgtccgcgccatcgcggaacatctgataaagctcttccagtgtcaggctttgccgtgcctgggtcgcctgtgcggcgcggataaagaaggtaccgaacagcggaccactggcaccaccgacgctggaaagcagcgtcataccggtattcttgagaatgaaaccgatatctttatctgcgatagcagggagtttttccaccactttgctaaagcctcggttcatatttagcccgtggtcagcatcgccaatttcgcgatccagtccggtaagatactcgctctcggtgctgaaaatatcgccacaacgagtgagccagttaacaatttgagttctgctcagactcattgctttctccttatttaccccagttaagggccggggtgtggaccggggcgtcccagagtgccagcgtttcgtcatcaactttcagtaaggtgatactgaaaccggtcatatccagactggtgcagtacgcgccaattaaattacgttcgatagtcaatcccgcttgctggcaacgtgtggtcaggcggttatagacgccgtacagctcagaaagcggagttgcgccaagattgttaaccagcgcaatcacccgatcgccagactggagcggttgtttggtttgttgttcttcctgccaactgccttgttgataatcccagaaacgcaaagtgcgatggtaactgccatttaccagcagggtgtcgaacatttcatcgacggtttgatcaagggaagagaaggggcggcggtcaatacccggctcaccatgaatgccgacgccaaactccatctcattatccgccagggtaaaagaaggtttgcccgcggcaggaacggtacaggcaccgagagcgatacctatactgtggccttgattattcagcttacgccccagttccgcacaggcgtccagactgtcgccacgctccgccgctgcgcctacgagtttttcaattaatacggtgttggcaacgccgcgtcgcccggcagtataaagactgtcttttaccgcaacgtcgtcatcaatgaccacagtggtcacttttacgccgctatcgtgcagtaactcggtcgctgtttcaaagttaagaatatcgccggtgtaatttttgataatcaacagtacaccttcgccgccatcaacttgcatggcgcattcaaagattttatcgggcgtcggactggtgaaaatttcgcccggacaggccccgctaagcatcccctgaccgatataaccacagtgcatcggctcgtgtccgctgccgccaccgctcagcagggcgacttttcctgcaacaggggcatcagctcgggtgacatacaccggatcctgatgcagtgtcaggcttggatgcgctttcgccagtcctgccagttgttcgtccagtacgtcttgcacatcattgatcaattttttcattattttgctccagcaattacggtagggcatggatgatgttcaacgacacggcgaccactgactgccgatgaatccattgtgcatcaggcaagggaaaagaaaattagcccaaattatgtttcatagtgaaacatatgctttaatgaatgttccatattgaaacttttacgtgtattaatacttaaaattgcgagccggaacaccttttgtcataagggatgcgggatatgagtggcgcttttaacaacgatggtcggggcatatctcccttaattgcaacctcctgggagcgatgcaataagctgatgaaacgggagacatggaacgtaccacatcaggcccagggcgtgacatttgcttctatttatcggcgtaagaaagcgatgctgacgctcgggcaggctgcgctggaagatgcctgggaatatatggcaccgcgagagtgtgcgctgtttatcctcgatgaaaccgcctgcattctcagccgtaatggcgatccgcaaaccttgcagcagctaagtgcactgggattcaatgacggcacgtattgcgccgagggaattattggtacttgtgcgctaagcttagcggctatctctggtcaggccgtgaaaacgatggccgatcaacatttcaaacaggtactctggaactgggccttttgtgcaacgccgttgtttgacagcaagggccgattgacgggaacaatagcgctggcgtgtccggttgagcaaactaccgcagctgatttgccgttgacgttggcaatcgcccgcgaggtcggaaatttactgctgacggacagtttgctcgctgaaactaaccgtcatttaaatcaacttaatgccctgttagaaagtatggatgatggcgtgattagctgggacgagcagggtaatttgcaatttattaatgcccaggcggcgcgggtcttgcgccttgacgcgacggcaagtcagggacgggcaatcactgaactcttaacgttacccgccgtattgcaacaagcaataaaacaggcacatccgctcaaacacgtagaagcaacctttgaaagccagcaccagtttattgatgcggtgataacccttaaaccgataatagaaacgcagggaaccagctttattttgttgctccatcctgtggaacagatgcggcagttgatgaccagtcaattaggaaaagtcagccataccttcgctcatatgccacaggacgatccgcaaacccgccgcttgattcattttggtcgccaggcggcgcgcagtagctttcctgtcctgctttgtggagaagagggcgtgggcaaggcactgctaagtcaggcaattcataatgaaagcgagcgtgctgcaggtccttatatcgccgtcaattgtgagttatatggtgatgctgcgctggcggaagaatttattggtggcgatcgcacggacaatgaaaatggccgtctgagtcggctggaactggcacacggcggcacgctgtttcttgaaaagattgaatatctggcggtggagttacagtctgctttgcttcaggttatcaagcagggggttatcacgcgactggatgcgcggcgtttaataccaattgatgtcaaagtgattgcaacaacgaccgcggacctcgcaatgctggtggaacaaaatcgttttagtcgccagctgtattacgcgctgcatgcatttgaaattaccatcccgcctctgcgtatgcggcgtggcagcattccggcgctggtgaataacaaattacgcagtcttgaaaaacgcttctctacgcggctgaaaattgatgacgatgccctcgctcgcctggtttcttgtgcatggccaggcaacgattttgaactttacagcgtcatcgagaatcttgctctgagtagtgataacgggcgcattcgcgtcagtgatttgccggaacatctgtttaccgagcaggcgacagatgatgtcagcgccacccgcctttccaccagtctgagttttgcggaagttgaaaaagaggcaattattaacgcagcccaggtcacaggcggtcgcattcaggaaatgagcgctttacttgggatcggccgcactacgctgtggcggaaaatgaagcaacatggcattgatgcagggcagtttaagcgccgggtatgaaagacagaaacgatttctgatacatcagagtgatctgtatttcattccggcgcacgctaacaattttcagcatcgtttaagggcttgtctatcccgcacttaaaagctgaagcgatatcctccgttgacttgcttctgatcaaagaggttaccctgcgtgtaatccgcttcgagatagaatgtgtgctgtttgttatactgtgcactgactcccacgccgttattccagccattacctttgaaactgtacttctcccgggagttgttcaacagatattcggtatccccactaaactcgcggatagcgccagtcttcacatagacattcagctggctgttgcctgcggtgatgtcataccccagtatcatgctggcacgccccagcaggctttcgtagtgattcagatgtatattgaggccattactcgccttcatagtcatctcattctggtggctgtatgtaagctgggtttgcggctctatatagaacccataaccagtaggggacaggttgaacctctgcccggcttccagggagatgctcattccattcgcagtgccgttggcgttaacgccgttgttctgactgtccagtacgtggaaactatttttctggcggcttgcttttataacgagatcgctgtaaaaaccgttttgtgccatgtaactggcgtacattcccatgtagtcactacgtgcggtaccgtcgcctccgctatagtccgggcttgcatgtgtactgccaatatacagaccgacatacaacggcattacatcagagagacgtttatccccaccaaactggataccgctgtaacccatgtcaaagccgctcagtttgccactggcaaaggagtccaggcttcccccataactgcgcaaccagatattaccgtctttactctgatttcgcaggtcacccatccgttgcatcagcgtacggttttcaacatagttcaataagtaaccgacattgagataattgccgccagcatctgcggtcgtggtgggtttaggcgtgggagcgggttcaggcgtaggatcggggttgactatgggaggctgagcgggagctggtgtgggttcaggattaggagtcggttccggaactgtcccggaagcgtaaagctcccagttagtgccatttttacgcacatcgtacagatatccccccaactcaacctgagaagacgcgctgaagctggccgcgccgtcagtggtttttaccactgtcagaacttcatttcccgttgtggcctcgctgccctggttgcggatagccaatacgtgattaccagcactactcccgctgatattcaataaatcccctttattattaacgccattaccctcgccaacaacatcagcacgcataataaaggtactgttaccgctcaggttctctacgtttaatgtggcaaatgtgccggcagtactcccgtggctggcaaaatcgacagtactatggctcagcgccagcgtgtcgagattagaattacttgttacgttccagacgctgttattcattgcaacgtccagttttccgccattgacattatcgctgagggaggaacctgtccaaacgctcccagggtgcatatccagattgattagcccacctttggaaagaacgctaccgttgataagcatacgaccgctggcgttgatgcggctggcggcataaccatcgtcatgttgcgttgcgatggccatctggtcgggtgtactcatatcaatgaccagatcgctcgtgaggtcgatctggctgttggtcatggcataaattcccctggctcctgccgcgccggtgatagccaaactgtctccggttattctaccgccgctgagagcccacaaacccagcgccagactgccattacgatcaactgtaatatcggtattttgcatgttgacaacagccgttgccgtctgggcgctggcaccataagaaccgccggaaaagatgctgtttcgttgcgctgccgtgccagtaaaattgattatcgcgtcactaccactggtgacgaggccaccgccctgcgcggaagaaatatggctatctgcaccgatagtggttgtaccaccacgaacttcgacgccattggccgcggctccagttacatcaacagtgagtgcattcgcgctaacctggccaaagctccagaggccgtgagcattatcgccattggttttaatggtactgtttgttccgagatcgacaacagagtttttctgtacgtttatccccatggcgctgtagccctgaacatcgattgtcaggtctgtagccgtaaaacgcgcagcaccattggcgttattgccgttgagaccaccgatataaacacctgtacttccatcggtcgtgattttacttccgcttccaagatcgacactggtgccatagtcattgatggttaggcctataccgttgctgttttcaatggtgaattgagtggctgttagtgtactgctatgcccaataatgatgccgtcatcgttactcttaatggtgctgcctgtgcctaagtcagcatgggtatagtcaccaattaagttaatgccgatggcagaggtttgaccaacaacatctactgtgagtcggttagctgtcagggagctgtttttgccctgaataatgattccttttgcatatccagaggcgtcgttgacattgacggtgacatcattacccaggttgatattgccaggcgtgtttcctgctggggtcattacaccatagaggtttccacttggatcggcggtatctcctgtaattctgtcaccatcattaatagtaatattggtgccatattgacttcctgtatcagcagctatcagcaggggggaaaagataattgcattcaaaccaatagcgccaaattttatcagttgaatactggggctacggatttttaattcagcgagacgatctgctttggtattcccattgtgttgtttgatgcccataccactcctatatagtacccagactatgggtctatggattttgtcattttgtttaaatcaatgaataatatcctcttatcatcatgatatttgtatggtgcaatcatgatgagcttctcagagaataattctctattaccgggcaaaatcaggaacacaggaattaatatatatttaacatcccccttacaaaggtgagtttatatcgagttattccctaagttgtcgttacttattccaattcgttactataaatatggcaaaaatattacaacaaacagcggttaaaaaatttggtgaagattttttgtaataatcctaattagttatgggaatttcgcttgatgtatctgcataacaaaaacaatatgcgccatttttgcattactaataagaaaaagcaaaaaacatcgatattcatttttggtcaatgggttttctggcctatcgttgttattgtgctactggttatcattttcatcttgccagcatattggagcgtgatcaattttgatcagctgtgaagggggctgatgtgtagtgatacaaaaacttacgttatatcactgctaatgagatatccggcatctgaacacttatgtctttaattattctcgtggttcactataggcaataagcacaaaagtgtaggatgttacaagaatgattaggactcggtgaaatgaaaaatccacgcaattgcgtggattttatatacttttgcgctcttcatgagatttagcgaaacctcatgagacaataaattaattagacgttgaaaaggaagttcatcacatcgccatctttcacgatgtaatctttaccttctgcacgcattttgcctgcttctttcgcgccttgttcacctttgtaagtgatgaaatcttcaaagctgatggtttgtgcacggataaagcctttttcaaaatcagtatggattttgcccgctgcctgcggcgcggttgctccaaccggaatggtccatgcacgcacttctttcaccccagcggtgaagtaagtttgcaggttcagcagtttataaccggcacggatcacacggttcaggcccggctcttccagcccaagctcctgcataaactcgtcacgttcttcgtcgtccagttcggcaatgtctgcttcaacagcagcacaaaccggaaccacaacagaaccttctttcgccgcgatttcacgcacctggtcaagatatgggttgttttcaaaaccgtcttcgttgacgttggcgatgtacattgttggtttcagcgtcaggaagctcaggtaacgaatagccgctttctcttcagcgcttaaatccagcgcgcgcagcatacctgcattttccaactggggcaggcatttttccaggaccgccagctcagctttcgcgtctttatcgccacctttggctttcttctgtacgcgatgaatcgcacgttcgcaggtgtcgaggtctgccagcgccagttcggtgttgataacttcaatatcgtcagccgggttaactttgccggaaacgtgaatgatgttgtcattttcaaagcagcgaacaacgtgaccgatcgcttcggtttcacggatgttggtcaggaactggttacccagaccttcgcctttgcttgcgccttttaccagaccggcgatatcgacaaattccatggtcgtgggaagcgtacgctgcggttttacgatttcagccagttgatccaggcgaggatcaggcattggtacgacgcctgtgttcggctcaatggtgcagaatggaaagttggccgcttcaataccggctttggtcagcgcgttgaacagggtagatttcccgacgttgggcaaaccgacgataccgcatttgaatcccatgatttaaatcaccttaatatcttaataatcaacctgttattgctaacagattgcagaaatggaaataactttgcctattatacacggcactcggcaaaaatgccgcagacaacgacttattgcgctttaaaggcgtgcaatcggttcgttgctttggtcaagccatctgtaaaccacatttcagtacaacgcgccgcttcgtcaatggcttcatcaattaacttctgttcactaacaggcggtttgcctaacacaaaaccgacaactttatttttatcgcccggatgaccgattccgatgcgtaaacggtgaaagttagggttattacccaatttactgatgatgtctttcagtccattgtgaccaccatggccaccgcccaatttaaatttggcgacgccaggaggcagatccagttcgtcgtgggccaccagaatttcgtccggattaatgcggaaaaaactggccatcgccgcaacggctttgccgctgagattcataaatgtagtcgggactaacaggcggacatcttcgcctccaagagtgactcggctagtataaccaaagaatttagcctcttcgcgcagcggagcgcgcaaacgctctgccagtaagtcaacgaaccaggcaccagcattatgtcgcgttgcggcgtattcagcaccggggttcgccaggccgacaatcaatttaatcgtcacgtttttttgtcctgagtgtgtacataactggcgcgtagtttactggttgcggccccgcttgacaaaaaactgcgtatcaaatgcagataacgtaataattgcctgagtggactattagaaagtcaaggtgttcaggcgtttatttgtaaagttttgttgaaataagggttgtaattgtgatcacgcccgcacataacccactgggtgttgtctatactttacacataaggaagaggggtattccctgttacaacccagaaagttccggaggtgacatatgaaacgcaaaaacgctagcttactcggtaacgtgctcatggggttgggtctggtggtaatggtggtcggcgtggggtatagtatcctcaaccagttaccacagtttaatatgccccagtatttcgcacatggtgcagtgctaagtattttcgtcggtgccattctctggctggcgggtgcccgtgttggcgggcatgaacaggtgtgcgaccgttactggtgggttcgccactatgacaaacgttgccgccgtagcgataatcgccgtcatagctaacaaataatgcagtttgctgaccagtcagtttgcgctgactggtcaatctcgtacttataaatccgccatcgccgcgcgacgattcgggaagaacgccaggcgtcccgggatcggttgaatgccagcgcgagccatagtgcgcagtggctggaattccacgttgcacacgcgcagttcacatccctcgggcagacgcttcacaaaacgctggaacgcatcaagaccaccagcatcaagtaccggaacggcatcccacttcagaatcacaatccgtttgccttcaagacgactctccaggtccgtgaataagccttcagcagcagcaaaaaacagcgggccaataacgcgcagaaccaggacatcgtctggaacatctacgactaccggtgccaggcgagtcatacgtgcgatacgacgcataaacagcaggcttgccagcacgatccccacgctgatggcaataaccatatcaaacaacacggtcaggctcatgcacagcagcatgacgatgatgtcatctttcggcgcatgacgcagcaagtcgaccactttgtgcgcttcactcatgttccacgccaccatcaacagcagggctgccatggcggaaagcggcagccaggagagcagcggtgccagtaccagcagggcaagaataaccagaatagagtggatcaccgcgctgataggggacgttgccccggcacggacgttagcggcagaacgcgcgatggcagctgtagcggtaataccaccaaagaacggagcgataatattccccagtccctgtccaaccagttcgctgttcgccttgtgtttcgtcccggtcataccatccagcaccacggcgcagagcagagattcgattgcgccgagcattgccatactgaatgccgcaggcagcagtgtgcgaatagaatcccaggttagcgtgaattcactattaggcagatcccacggcagcaccagttgcggcagcagttgcggaataccgttaccctgagaaccatcggccaggacgtagtggaattggctaccgatggtagcaacatgtccgccgagcaggttaacaatccccatcaccgcgcaaccagccagcaaggccggaaggtgaccgggtaaacgaatgcccagacgcggccaaaaaacaagaatacctagcgtcacaatgccaatggcagcatcacccacattaatggtcggcagcgccataaataatgcgccgactttttgtagataatgttccgggacatgggccatttgcagaccgagaaaatctttaatctgcatggtaccgatggtgatcccgataccgctggtgaaacctaaggtgacggaaaccggaatatactcaatcaggcgaccaaagcgtgccagacccatcagaatcaaaaagatcccgctcagcaaggtcgcaaccagcagtcctgccagtccaaactgttggctcacgggatagagaattaccacaaatgccgcagtcggaccggaaacgctaaagcgactcccacccgtcagagcaatgacaatccccgcaacagctgcggtatataaaccgtactggggtgccacaccactaccaatagccaacgccatcgccagcgggatagcaataatcccgacggttatcccggcaatcaggtcacgggtaaaccgtgcggcagtatatttttctttccagcaagcgtcgatcagagcgcggaaaggcatcacatgactggaaaatattttgttcacaataatgtttcatccgtgagcgcatcatctgtcaactaaatggcaggtgaaggaggcataggtcatacaaatggatattacagacaaaaaaacccgccgcagcgggtctttgagccgggttcgattagtgttcgaacatggcagagatgctttcttcgttgctgatacgacgaatcgcttcggccagcataccactcagggtcagagtacgcacgttcggcagacttttgatttcatcgctcagcggaatggtatcgcagacaacgacttcatcaattacagagttacgcaggttgttcgccgcgttgccagagaagatcgggtgagtcgcgtacgcaaatacacgtttagcaccacgttctttcagagcttcagcagctttacacagcgtaccgccagtgtcgatcatatcatcgaccagtacgcagtcacgacctgcaacgtcaccgatgatatgcatcacctgactaacgttcgcacgcggacgacgtttgtcgatgattgccatatcggtatcgttcagcagcttagcgatagcgcgggcacgcacaacgccgccgatgtccggagaaaccacaattgggttatccagattcagctgcagcatgtcttccagcaggatcgggctaccaaatacgttatcaaccggaacgtcgaagaaaccctgaatctgttcagcgtgcagatccactgtcagcacacggtcaacaccgacgctggagaggaagtctgcaaccactttcgcagtgattggtacacgagcggaacggacgcgacggtcctggcgcgcatagccaaagtaggggataacagcggtgatacgacctgcggaagcacgacgcagggcatcaaccataacgactaattccatcaggttgtcgttagtaggggcacaagtggactggatgatgaaaatatcaccaccgcgtacattttcattaatttgtacgctgacttcgccatcgctaaagcgacctacagcggcgtcgccgagactagtgtacaggcggttggcaatacgttgtgctagttccggggtggcgttaccagcaaaaagcttcatatcaggcacgagaagaacctcaggcatgcgtccattggtggaaagaatctgccgaaaactgtgcgggccaggcatgatcctttccaggcggtgtattaaagagcgcgatgcaacgtctggaacaaggtgacgttgtcaccgaaactcagcttgcccggcttaaagcatggctctgtgcaatggggaaagattagcgcctttcgccacaaagccattgagccattccggggcttgctctagcacctggcgggcttcagactctgtatcaaattcagcaaagacacaggcccctgtcccagtcaggcggctcggggcgtattctaacagccaggaaagcaccgcatcaacctcgcgaaaacgttttcttgcgataacctcgcaatcattgctgaattcacattttagcaacgtttctatactcctttttggcgtattgcgcgggagttcaggatctttaaaaatcaccggagtcggaatacttacaccagggtgcgccaccagataccacttctctggcggatccaccggcgttagtatttcaccaacgccttcggcaaacgcggcatgcccccgaacaaagacaggaacatctgcgcccagcgtcagccccatttccgccagctcatccatgcttagcccgcattgccagagatgatttaatgccaccaggaccgtcgcggcattggaactaccaccgccgagaccgccgcccatcggcaaacgcttgtcaatgctgatattcgcaccgcttcccgtcggaagacgcccgctgtctgccgcagttttcatcaacaatcgcgctgcgcgaacgatcaggttatcttcatgttccacgccttcaacgggcgttaacagacgaatatccccatcgtcacgaagctcaatgctgatggtgtcgccgtaatcaagaaactgaaacagcgtttgcagcgtgtggtaaccatccgcacgctgaccggtaatgtataaaaacagattaagttttgccggagagggccactgtgtccgcattatttcactatccagttatccatttttaacttgatgcgttgaccaccgtcggtgagttccatattggctggcatcgcaggttgcgttttggtgtcataaccaccataaacaaccttccagtttttgccattctggctgtaggtaatttcgctcaggcggtactggtcgtccagtttgtagtcggttgcatcacccggtaaacctaaaatccactggcgcaagctgttgagcggaattggcattccggtcaatttgccaatcatctcttcggcgtcatcggcggtataacgctgacctttattgtcgactaactgcacgttacccggttgagcattcagctccagttccgtgctgcccaatgggttagtgagcagcagacggtagcgatcctggccggtttgctgccagaaaaagcgggcgtacactttttgttggtcagaaatataagcgaacgcgccgcgagtctgatactgattaagattgcgcacgtcttgctgatgctgacgccattgtgggctatccgggcttttgccaggacctttgggcgtggtaacggaacaggcagtgagcacaagagcagccagcggtagcaggcggataagacgaaaatcgggcaggggcatagtgatgacaagtccttgagatacgttgcagttataacccttaatgctagcgttaccgtccgctatcgtctatgttcaagttgtcttaattgccagaatctaacggctttcggcaattactccaaaagggggcgctctcttttattgatcttacgcatcctgtatgatgcaagcagactaaccctatcaacgttggtattatttcccgcagacatgacccttttagcactcggtatcaaccataaaacggcacctgtaagcctgcgagaacgtgtaagctttagcccggataagctcgatcaggcgcttgacagcctgcttgcgcagccgatggtgcagggcggcgtggtgctgagcacgtgcaaccgcacggaactttatcttagcgttgaagagcaggacaacctgcaagaggcgttaatccgctggctttgcgattatcacaatcttaatgaagaagatctgcgtaaaagcctctactggcatcaggataacgacgcggttagccatttaatgcgtgttgccagcggcctggatagtctggttctgggggagccgcagatcctcggtcaggttaaaaaagcgtttgccgatagccaaaaaggtcatatgaaggccagcgaactggaacgcatgttccagaaatctttctctgtcgcgaaacgcgttcgcactgaaacagatatcggtgccagcgctgtgtctgtcgcttttgcggcttgtacgctggcgcggcagatctttgaaagcctctctacggtcacagtgttgctggtaggcgcgggcgaaactatcgagctggtggcgcgtcatctgcgcgaacacaaagtacagaagatgattatcgccaaccgcactcgcgaacgtgcccaaattctggcagatgaagtcggcgcggaagtgattgccctgagtgatatcgacgaacgtctgcgcgaagccgatatcatcatcagttccaccgccagcccgttaccgattatcgggaaaggcatggtggagcgcgcattaaaaagccgtcgcaaccaaccaatgctgttggtggatattgccgttccgcgcgatgttgagccggaagttggcaaactggcgaatgcttatctttatagcgttgatgatctgcaaagcatcattagccacaacctggcgcagcgtaaagccgcagcggttgaggcggaaactattgtcgctcaggaaaccagcgaatttatggcgtggctgcgagcacaaagcgccagcgaaaccattcgcgagtatcgcagccaggcagagcaagttcgcgatgagttaaccgccaaagcgttagcggcccttgagcagggcggcgacgcgcaagccattatgcaggatctggcatggaaactgactaaccgcttgatccatgcgccaacgaaaagtcttcaacaggccgcccgtgacggggataacgaacgcctgaatattctgcgcgacagcctcgggctggagtaacagtacatcattttctttttttacagggtgcatttacgcctatgaagccttctatcgttgccaaactggaagccctgcatgaacgccatgaagaagttcaggcgttgctgggtgacgcgcaaactatcgccgaccaggaacgttttcgcgcattaagtcgcgaatatgcgcagttaagtgatgttagccgctgttttaccgactggcaacaggttcaggaagatatcgaaaccgcacagatgatgctcgatgatcctgaaatgcgtgagatggcgcaggatgaactgcgcgaagctaaagaaaaaagcgagcaactggaacagcaattacaggttctgttactgccaaaagatcctgatgacgaacgtaacgccttcctcgaagtccgagccggaaccggcggcgacgaagcggcgctgttcgcgggcgatctgttccgtatgtacagccgttatgccgaagcccgccgctggcgggtagaaatcatgagcgccagcgagggtgaacatggtggttataaagagatcatcgccaaaattagcggtgatggtgtgtatggtcgtctgaaatttgaatccggcggtcatcgcgtgcaacgtgttcctgctacggaaagccagggtcgtattcatacttctgcttgtaccgttgcggtaatgccagaactgcctgacgcagaactgccggacatcaacccagcagatttacgcattgatactttccgcagcagtggggcgggtggtcagcacgttaacaccaccgatagcgcaattcgtattactcacttgccgaccgggattgttgttgaatgtcaggacgaacgtagtcaacataaaaacaaagctaaagcactttctgttctcggtgctcgcatccacgctgctgaaatggcaaaacgccaacaggccgaagcgtctacccgtcgtaacctgctggggagtggcgatcgcagcgaccgtaaccgtacttacaacttcccgcaggggcgcgttaccgatcaccgcatcaacctgacgctctaccgcctggatgaagtgatggaaggtaagctggatatgctgattgaaccgattatccaggaacatcaggccgaccaactggcggcgttgtccgagcaggaataatggaatatcaacactggttacgtgaagcaataagccaacttcaggcgagcgaaagcccgcggcgtgatgctgaaatcctgctggagcatgttaccggcagagggcgtacttttattctcgcctttggtgaaacgcagctgactgacgaacaatgtcagcaacttgatgcgctactgacacgtcgtcgcgatggtgaacccattgctcatttaaccggggtgcgagaattctggagcttgccgttatttgttagcccagcgaccttaattccgcgcccggatacggagtgtctggtggagcaggcactggcgcggttgcctgaacaaccttgccgtattctcgatctcgggacgggtaccggggcgattgcgcttgcgctggctagcgagcgcccggactgcgaaattatcgctgtagatcgtatgcctgatgctgtctccctggcacaacgtaatgcccagcatctggcgatcaaaaatatccacattctgcaaagcgactggtttagcgcgctagccgggcagcagtttgcgatgattgtcagcaatccgccgtatattgacgagcaggaccctcatcttcaacaaggcgatgtccgctttgagccgctcactgcgctggttgcggcagacagtggaatggcagacatcgtgcatatcatcgaacagagccgtaacgcgctggtatccggcggctttctgcttctggaacatggctggcagcagggcgaagcggtgcgacaagcatttatcctcgcggggtatcatgacgtcgaaacctgccgtgactatggtgataacgagcgcgtaacgctcggccgctattatcaatgacaagtttttctacactgcttagtgttcatcttattagtatcgcgctttctgttgggctattaaccttacgtttctggctacgttatcagaagcatccacaggcatttgctcgctggacgcgcattgtgccgccggttgtcgatacgctgttactgttaagcggcattgcgttgatggctaaagcgcacatcctgccattttccgggcaggcacagtggctgactgaaaagctgtttggagttatcatttatatcgttttgggttttattgcactcgattatcgtcgtatgcacagtcagcaggcgcgcattattgccttcccgctggcgttggtggtgctgtacatcatcattaaactcgccaccacaaaagtaccgttactggggtaagtcatgagaagcttagctgatttcgaatttaataaagcgccattgtgcgaaggcatgatcctggcttgcgaagcaatccgccgcgattttcccagccaagatgtttacgacgaactggagcgtctcgttagtctggcgaaggaagaaatcagccagcttctgcctttagaagagcagttggaaaaactgatcgcgctgttttacggcgactggggatttaaagccagtcgcggtgtttatcgtctttccgatgcattatggctggaccaggtgttaaagaatcgacagggcagtgcggtaagtttaggtgcggttttattatgggtcgcgaatcgtctcgatttgccgctgctgccggtgattttccctacgcagctgatattgcgcattgaatgtccggatggcgaaatttggctgattaatccttttaacggtgaaagcttaagcgaacatatgctggacgtatggttaaagggaaatatcagcccgagcgcggaactgttttatgaagaccttgatgaagctgataacattgaggtaatccgcaaattgctggatacactcaaagccagcttgatggaagaaaatcagatggagctggcgttacgcaccagcgaagctttattacaattcaaccctgaagatccctatgaaattcgcgatcgcgggttgatttatgcgcaactggattgcgaacacgttgcgttgaacgatttaagttatttcgttgaacagtgtccggaagacccgatcagcgaaatgatccgtgcgcaaataaataacatcgcgcataaacatattgtgctgcattaattaatcgacattttactcaagattaaggcgatcctatgaaacaaaaagtggttagcattggcgacatcaacgtagcaaatgacctgccgttcgtactgtttggcggtatgaacgtgttggaatctcgcgatctggcgatgcgcatttgcgagcactacgtaactgtgacccagaaactgggtatcccttacgtgttcaaagcctcttttgacaaagccaaccgctcctccatccactcttatcgtggaccgggcctggaagaagggatgaaaatcttccaggagttgaagcagacttttggcgtgaaaattatcaccgacgttcacgaaccaagtcaggcacagcccgttgctgatgtcgtggatgtgattcagttgccggcgtttcttgctcgccagactgacctggttgaagccatggcgaaaaccggtgcggtaattaacgtcaagaaaccacagtttgtcagcccgggacagatgggtaatatcgttgataaattcaaagaaggcggcaacgaaaaagtgattctttgcgatcgcggtgctaacttcggctatgacaacctggttgtcgatatgctgggcttcagcattatgaagaaagtgtctggtaacagcccggtgattttcgacgtgacccacgcactgcaatgccgcgatccgtttggcgcagcttccggtggtcgtcgtgctcaggtggctgagctggcacgagccggtatggcggtaggtctggcggggctgtttattgaagcgcatccggatccggaacatgcgaaatgtgatggtccatccgcgctgccgctggctaaactggaaccgttcctcaagcagatgaaagcgattgatgatctggtgaaaggtttcgaagaactggataccagcaagtaatcttttttgcttgaaaaataaagtattagcgttctgcgttaagacttttttcatgggtgccggatacaaaaaaggccgcaggctgttacccctgcggccggtttcgggcgcatattgccatcacggcagcctgacgcccgttttcaccttacttccggttacgccaccagctgacaatcgctgcggtaataattcccgccaggatcggtgctgccaggtcgtgccagaaaatcatggcaaactgcgcgagcgtcatatagccgccttgttgtaatgacaacattttgcggctattcttgaattgttctggttcaagattagcccccgttctgttgtcaggttgtacctctcaacgtgcgggggttttctctttccagcaaccaatgccaccagggataaagcccccgcaacattgcgcctcaccggataacgccggcttggtgtggatactacgactcaattcatcttcacttcatccctgaaatgtttgcaatgaagagtgcattccggtttttcaacagctgttacagtcatttcatgagtgctctggatgaggcttccagctcgggttgccaatatttacttgtggaagtgataaagacaaaaatggccgcaggctgttacccctgcggccggtttcgggcgcatattgccatcacggcagcctgacgcccgttttcaccttacttccggttacgccaccagccgacaatcgctgcggtaataattcccgccaggatcggtgccgccaggtcgtgccagaaagtcatggcaaactgcgcgagcgtcatatagccgccttgttgtaatgacaacattttgcggctattcttgaagtgtctggtttcaagattagcccccgttctgttgtcaggttttacctctcaacgtgcgggggttttctctttccagcaaccaatgccaccagggataaagcccccgcaacattgcgcctcaccggataattccggcttggtgtggatactacgtctcaattcatcttcacttcatccctgaaatgtttgcaataaagagtacattccggcttttcaacagctgttgcagtcgtttcatgagtgctctggatgatgcttccagctcgggttgccaatatttacttgtggaagagataaagacaaaaatggccgcaggctgttacccctgcggccggtttcgggcgcatattgccatcacggcagcctgacgcccgttttcaccttacttccggttacgccaccagctgacaatcgctgcggtaataattcccgccaggatcggtgctgccaggtcgtgccagaaaatcatggcaaactgcgcgagcgtcatatagccgccttgttgtaatgacaacattttgcggctattcttgaagtgtctggtttcaagattagcccccgttttgttgtcaggttttacctctcaacgtgcgggggttttctctttccagcaaccaatgccaccagggataaagccccgcaacattgcgcctcaccggataacgccggcttggtgtggatactacgtcgcaattcatcttcacttcatccctgaaatgtttgcaatgaagagtacattccggcttttcaacagctgttgcagtggtttcgtgcagggtgtggtacaggctcgcaattctgattaacgacctgtccaggtagtatgaagaaatacaataagcaggaatttatattatctcccccgattaccgtcatcggaggagatataactgtcaggcaaatatcgtcatcaaataggcggcaaacagtgccagatgcgctgcgccattgagcatgttagtacgtccggtggagaaggagatatggcacagcactaaagaggccaccatcaccaccatttctggcgcaccaagtgcaaactgcaattcgttacccgtcataaaggcaattagcgtgacgacaggtacggtaaggctaatggttgctaacacactaccaaagaacagattcatcgcgcgctgaacctggttgttcaacactgcttttaatgcacctaaaccttccgggctcagaatcaacagtgccaccaggaagccagtaaaggcgacaggggcattcatgctgtcgagcaatgtctccaggctgctggcgttcattttggtcaccgcaataacggcaatcagatggataatcaaccagatagcatgccacaggctgctatgggcagacggtttaccgtgatgcgggtcgtcatcatcactgtcatcttcgtgctcgtagacaaacaaactttgatgcgttttggtctggatcagcaaaaatacgccatacattgccgcagaaattaatgctaccagtaacgcctgaccggtactaaaattcgccgcaggcagagccattggaaataccagtacgattatcgccagggggaacagcgcaattaaatactgcttgataccaaacagattcatatattgggtggcaaacttacgaccgcccaacaataaactaaagccaaccagcccaccggtaacaatcataatgatactatagagcgtatcacgcattagcgttggcgcggcgtcgccggttgccattaaagcactaatcaaactgacttcaagaataaccacactaaggctaagaataaggctaccgtaaggttctcccaggcgatgggctaatacgtccgcatgacggacaacactaaaggcgctacttaaaataccaataagcgcaagaagattgatggcaatgaccactggtagtgtctggctgcttccccacaggaacagcactaccagcgccagaaccgggaaaataaggctagtctccttgtggcgggtttttaccgcctcttgagcattactcattatggttatccctttgcagatgaatttatcgaaaatgtaaaaaataggtaggaaaaataacagaaagtgtctggatatcggtaacattttacgaatttttaccccgctgtcgattttttactcattggggcataaaaataagtattacgtttagacaatgtttgttttagcgtctcttaagaagagtctgacctgaaaattcttatgttttggcaagagtagatattgttgaccacacttaatgttcaactttgtaaaaggagtcaacgatgccgtataaaacgaaaagcgatctgccggaaagcgtaaagcacgttctaccgtctcatgcccaggatatctataaagaagcgttcaacagcgcatgggatcaatataaagataaagaagatcggcgtgatgacgccagtcgcgaagaaaccgcgcataaagtggcctgggctgctgtgaagcatgaatatgccaaaggggatgatgataaatggcataaaaaaagctaaaaccggtcgcttagttaaagctattcgtgcggtgttgccttgcaagtggtccgtggattgcatattgtcccgttagtggtttcaaaatgagcagtaaaaatgtccggaagacaccaaaaagttgtcgcagggaagtatgcagtggcggaagtgtaaggtgataacgcgtgatttcttgatgaatgccgattgtaaaacggcatttggtgccattgaagaaagtctcttatggagtgcagaacaacgggcggctagcctggcggcgacgctggcttgtcgacctgatgagggaccggtgtggatcttcggctatggaagcttgatgtggaatccggcactggagtttaccgaaagctgcaccggtacactggttggatggcatcgcgcattttgcctgcgcctgaccgccgggcgcgggactgcgcaccagccgggacggatgcttgcactgaaagagggcggacgcaccacaggcgtcgcctatcgactgccagaagagacgctggagcaggaactaaccctgttgtggaagcgagagatgattaccggctgttatctgccaacctggtgtcagcttgatcttgatgatggacgcacagtaaacgccattgtgtttattatggacccgcgacatccagaatatgaatctgatactcgcgctcaggtcatcgcgccgttgattgcggcggcgagcggtccgctgggaaccaacgcacaatacctgtttagtctggaacaggagcttatcaaactgggaatgcaggacgatgggctgaatgatttgctggtaagcgtaaaaaaactgctggcggagaattttccggatggtgtgttacgtccgggattcgcctgagtaaacttcccgcatagtggggcgtcagacgccccctcaaacattaaaatgtgagcactttatcggcactcagcgtccattgcgccagttccacaagagtaccgatttccaccccatcaatcagaggaagtgtactaatcccgcgcccgtcggtacaggttttgcacaatttcaccggtacattctgagcggtaaggatctccagcatttgctgaatgttgtagccttcccctggtttttgcccgcgcaacccggctgtgaccgcatcagacatgaggaacagacgcagatccagattgctctcctgctctcgtaacgcaatggccagccgcaagctgttaaacaaggattcgctcccgtaaggtgcgccattggcaacgatcacgattttttgcattatttactcctgtattcagggaattagacactcatcttctatcttactgcttctgcagcgtctgaccaatcggtcacatttttaaggattttcctgaaagcgcgagaaaatacgacaaaagttgccagtaatcgttattctttaaggctatggtttttcattattaccggaagttaccgacgttttgagccgtttcgttcctcgcattatcccgttttatttactcttgcttgtagcaggcggtacagctaacgcacaatctaccttcgagcaaaaagcggcaaatccctttgataataacaatgatggtctgccggatttaggcatggctcccgaaaatcatgatggggaaaaacactttgctgaaattgtgaaagatttcggcgaaaccagtatgaatgataacgggctggatactggcgagcaggcaaaagctttcgcattgggaaaagtccgcgacgcgcttagtcaacaggttaatcagcacgtagagtcctggctaagtccgtggggaaatgccagtgttgacgtcaaagtggataacgaaggacatttcaccggcagtcgtggaagctggtttgtgccgttacaagataatgatcgttatctcacctggagccagcttggtcttactcagcaggataatgggttggtgagcaatgtgggcgttgggcaacgctgggcgcgcggcaactggctggtgggttataacactttttatgacaacttgctggacgaaaatcttcagcgagcgggctttggtgccgaagcgtggggcgaatatttgcgattaagcgcaaacttttatcagccgtttgctgcatggcatgaacagacagccacgcaggaacaacggatggcgcgcgggtacgacctgacagctcggatgcgcatgccgttctatcaacacctcaataccagtgtcagcctagaacagtattttggtgatcgtgttgatttgtttaactctggtacgggttatcacaatcccgtcgcgttgagtctgggattaaattacacccctgtgccattagtcactgtgacggcccagcataaacagggtgaaagtggcgaaaatcaaaataacctcgggctgaatcttaattaccgctttggtgtaccgctcaaaaaacaactttctgcgggcgaggttgccgaaagtcagagcttacgtggtagtcgctatgacaatccgcagcgaaataatctaccgactcttgagtaccgacagcgaaaaacgttaacggtgtttctggcgacaccgccgtgggatctaaaacctggcgaaacagtgccgctgaaattacaaatccgcagtcgttacggtattcggcaactgatttggcagggcgatacgcagatattaagtttgacgccgggcgcacaagccaacagcgcggagggctggacgctgatcatgcctgactggcagaacggggaaggggcaagcaatcactggcgattgtctgtggtggtggaagataaccaggggcagcgtgtctcctccaatgagatcacgctaacgcttgtcgaaccgttcgatgcattgagtaacgacgaactgcgctgggaaccgtaatcagaaaatgcgctcctgatgcacccataccgctgcttccacgcgagacttgagcttcattttcttcagcatgtgcttgacgtgcacttttactgtgctttcggtgatatccaggcggcgggcaatcatcttgttcggcaaaccctgggcaatcagcttgagaatatcgcgctcgcgtggggttaactggttaacatcgcgctcagtagtggcacggttagcgcgcaagctggcggccagaacaggcgttaatgcttcgcttaataccatttcgccagcagctgcctgatgcaatgctttcagcagatcttccggttccatatcttttaacagatagccatccgcgccgcgtttcagtgcggtgaccacatcttcttcatggttagagacgctgaataccacaatgcgcccactgagggacttttcgcgcagtttatccagcgtttccagaccgttcatgccgggcatattgagatctaacaggatcagatcgggatcaagagactccgccagttcaataccctgttcgccattactcgcttcgccaaccacggtgatatctggtgccatactgataagctgttttacgccagttcgcagcatcgggtgatcgtcaatcagcaggatagtagccggttcctgattactcatgggtatctccttggacgtctgtgaaagttttttcgggaataaaggtgaccaccacttcggtgccaccactttcacgacggcggacgcggcaatcgcctcgtaaactttgcgcacgatcgcgcattattatcatgccgtagtgattgctgcggatggcattttcaggcacgccgcagccgttatcctggacggtcagtttgacctgattatcgttttgcgccaccgtcaccacgacttcactcgcttggctatgtttgagggcgttacttaatgcctcacgggcaatttgcaacaagtggattgcctgatggctaggcaccaggcgaggcggcaattgataatccagcttcaccgggaagccaaatttggcgctgtactcttcgcaactcgcctccagcgccggacgtaatccaggctcggtgagctgcaagcggaatgtggtgagcaattcacgcaactgcgcccaggatgcattcagttcgttacggatctgacttaacagttcgcggctgctttctggcagcgcatcgccctgcatctgtaaacaactcacctgcatcttcatgcaagagagagattgggcaatagaatcatgcagttcgcgcgcaatggtggcacgctcttccatcacgatcaactgttgctgacgttcctgatggcgatccagcgccagcgtggcggtgagttgttcaaccagggtatccaccagttgttgttgatcatggctaagatgacgcccctgcggcagggtcgccagcaaaataccgtactgcgtatgagagtcagccagccgccacttcagggtcgtgccgcgatcaccaacgggtaatacgccgcgcgggcagagctggcagcctttatcatcacaagtcatatctggctggcaggtaaactcctgatgattctcttcatcatcagtgtcatacacccgcaattcgatatcacgtagcagggttaaattctgtaagccgttgagtacaggactcaggcgttcacacagcggggcgcgggaatgcaaacggcggttagcctgccataaaaaagagaggatctgatttttatgctccagcccggcggttttctcctgaacccgctgctcaagtacggcataactttcggccagttctgcagacatattgttcaacgcagttccaagcatcgccatttcgttgcgcccgctgatgtttgcgcgttgggtaaaatcgcgatgactgacggcactcgccattgccagcagttgccgccacggttgtagcagtcgcgcccgcaaccagataatagtgaacaccagtaaaagtgccataaataccgccattacccgatggaccagtaccactgtctcgatgcgcatttccgtggtgcggtcaaaaccagataccagttgatcaagcccggcaacaaactggctgacatccgcactcaccgtttctcggttttgtgcacgcatcagcgcagggatcagttcattacgccagtaatcttgtaaaccctgtaattgcgccagttgtccgtctcgttctgctgctcgagtcaactcggcgctaaatgccgtttgttccatctctttaattaagggcttgtctttctcgcttaatggcactgccgccaacagacggtaactttgcatgcgcaggcttcccgctttgttgatcgcatgggcgctgccctgaacgccttgcaccagccagccagaaaccgccatccctgccagtccaatagcagtagaaagcaacacaataagcgcaacctgattaaccagggtgagcggagagagacaacgtttaagcatgtaaacctcttccttcaggctttaaatgagcaataaccttaatgaatgtgacgatacattctggaatggcagtattctcggctattggctgaagtatacccatacccggaaagagttactccttatttgccgtgtggttagtcgctttacatcggtaagggtagggattttacagcaccgtgaaaaatctcataatttttatgaagtcactgtactcactatgggtaatgataaatatcaatgatagataaagttatcttatcgtttgatttacatcaaattgcctttagctacagacactaaggtggcagacatcgaaacgagtatcagaggtgtctatgagtcacagttccgcccccgaaagggctactggagctgtcattacagattggcgaccggaagatcctgcgttctggcaacaacgcggtcaacgtattgccagccgcaacctgtggatttccgttccctgtctgctgctggcgttttgcgtatggatgttgttcagcgctgttgcggtgaacctaccgaaagtcggctttaattttacgaccgatcagctatttatgttgactgcgctgcctagcgtttctggcgcgttattacgtgttccatactcctttatggttcctatcttcggtggtcgtcgctggacggcgttcagcaccggtattctgattattccttgcgtctggctgggttttgccgtgcaggatacctccacgccttatagcgtcttcatcatcatctctctgctatgcggctttgctggcgcgaacttcgcatccagtatggcaaacatcagcttcttctttccgaaacagaagcagggtggcgcgctgggtctgaatggtggtctgggaaacatgggcgtcagcgtcatgcagttggttgctccgctggtggtaagtctgagcattttcgcagtatttggtagccagggcgtcaaacagccggatgggactgagctgtatctggcgaatgcgtcctggatatgggtgccgttccttgccatcttcaccattgcggcgtggtttggcatgaacgatcttgctaccagcaaagcctccatcaaggagcagttgccggtactcaaacggggtcatctgtggattatgagcctgctgtatctggcaaccttcggctccttcatcggcttctccgcgggctttgcaatgctgagtaaaacgcagttcccggatgttcagattctgcaatacgctttcttcgggccgtttattggtgcgctggcgcgttctgcaggtggtgcattatctgaccgtctgggcggaactcgtgtcacgctggtgaactttattctgatggcgattttcagcggcctgctgttcctgaccttaccgactgacgggcagggcggaagcttcatggcgttcttcgcggtcttcctggcgctgttcctgacagctgggctgggtagtggttccactttccagatgattagtgtgatcttccgtaaactgacaatggatcgcgtgaaagcagaagggggttctgacgaacgtgcgatgcgtgaagcggcaaccgacacggcggcggcgctgggtttcatctctgcgattggcgcgattggtggcttctttatcccgaaagcgtttggtagcagcctggcattaacgggtagcccagtcggcgcaatgaaggtatttttgattttctatatcgcctgcgtagtgattacctgggcggtatatggtcggcattctaaaaaataaaccgttactcgtcatacttcgggttacatgtgctgcggctgcgttcattcaccccagtcacttactttagtaagctcctgggattcattcacttgccgccttcctgtaaaccgaattatatagagtaaaatatttgattatcctttgcgcggcatgatgtcgcgctttttttatgcgtcatttagttacaacatactaatgttatatggtttatttcgccggatttcattaagagccattaatatgttacccatggggaatactccttaatacccatctgcataaaaatcttaatagtttaaataactacaggtataaaacgtcttaatttacagtctgttatgtggtggctgttaattatcctaaaggggtatcttaggaatttactttatttttcatccccatcactcttgatcgttatcaattcccacgctgtttcagagcgttaccttgcccttaaacattagcaatgtcgatttatcagagggccgacaggctcccacaggagaaaaccgatgagtaaattcctggaccggtttcgctacttcaaacagaagggtgaaacctttgccgatgggcatggccagcttctcaataccaaccgtgactgggaggatggatatcgccagcgttggcagcatgacaaaatcgtccgctctacccacggggtaaactgcaccggctcctgcagctggaaaatctacgtcaaaaacggtctggtcacctgggaaacccagcagactgactatccgcgtacccgtccggatctgccaaaccatgaacctcgcggctgcccgcgcggtgccagctactcctggtatctttacagtgccaaccgcctgaaatacccgatgatgcgcaaacgcctgatgaaaatgtggcgtgaagcgaaggcgctgcatagcgatccggttgaggcatgggcttctatcattgaagacgccgataaagcgaaaagctttaagcaggcgcgtggacgcggtggatttgttcgttcttcctggcaggaggtgaacgaactgatcgccgcatctaacgtttacaccatcaaaaactacggcccggaccgtgttgctggtttcagcccaattccggcaatgagcatggtttcttacgcaagcggtgcacgctatctcagcctgattggcggtacttgcttaagcttctacgactggtactgcgacttgcctcctgcgtctccgcaaacctggggcgagcaaactgacgtaccggaatctgctgactggtacaactccagctacatcatcgcctgggggagtaacgtgccgcagacgcgtaccccggatgctcacttctttactgaagtgcgttacaaagggaccaaaactgttgccgtcacaccagactacgctgaaatcgccaaactgtgcgatctgtggctggcaccgaaacagggcaccgatgcggcaatggcgctggcgatgggccacgtaatgctgcgtgaattccacctcgacaacccaagccagtatttcaccgactatgtgcgtcgctacaccgacatgccgatgctggtgatgctggaagaacgcgacggttactacgctgcaggtcgtatgctgcgcgctgctgatctggttgatgcgctgggccaggaaaacaatccggaatggaaaactgtcgcctttaataccaatggcgaaatggttgcgccgaacggttctattggcttccgctggggcgagaagggcaaatggaatcttgagcagcgcgacggcaaaactggcgaagaaaccgagctgcaactgagcctgctgggtagccaggatgagatcgctgaggtaggcttcccgtactttggtggcgacggcacggaacacttcaacaaagtggaactggaaaacgtgctgctgcacaaactgccggtgaaacgcctgcaactggctgatggcagcaccgccctggtgaccaccgtttatgatctgacgctggcaaactacggtctggaacgtggcctgaacgacgttaactgtgcaaccagctatgacgatgtgaaagcttataccccggcctgggccgagcagattaccggcgtttctcgcagccagattattcgcatcgcccgtgaatttgccgataacgctgataaaacgcacggtcgtagcatgattatcgtcggtgcggggctgaaccactggtatcacctcgatatgaactatcgtggtctgatcaacatgctgattttctgcggctgtgtcggtcagagcgggggcggctgggcgcactatgtaggtcaggaaaaactgcgtccgcaaaccggctggcagccgctggcgtttgcccttgactggcagcgtccggcgcgtcacatgaacagcacttcttatttctataaccactccagccagtggcgttatgaaaccgtcacggcggaagagttgctgagtccgatggcggacaaatcccgctataccggacacttgatcgactttaacgtccgtgcggaacgcatgggctggctgccgtctgcaccgcagttaggcactaacccgctgactatcgctggcgaagcggaaaaagccgggatgaatccggtggactatacggtgaaatccctgaaagagggttccatccgttttgcggcagaacaaccagaaaacggtaaaaaccacccgcgcaacctgttcatctggcgttctaacctgctcggttcttccggtaaaggtcatgagtttatgctcaagtacctgctggggacggagcacggtatccagggtaaagatctggggcaacagggcggcgtgaagccggaagaagtggactggcaggacaatggtctggaaggcaagctggatctggtggttacgctggacttccgtctgagcagcacctgtctctattccgacatcattttgccgacggcgacctggtacgaaaaagacgacatgaatactagcgatatgcatccgtttattcacccgctgtctgcggcggtcgatccggcctgggaagcgaaaagcgactgggaaatctacaaagccatcgcgaagaaattctccgaagtgtgcgtcggccatctgggtaaagaaaccgacatcgtcacgctgcctatccagcatgactctgccgctgaactggcgcagccgctggatgtgaaagactggaaaaaaggcgagtgcgacctgatcccaggtaaaaccgcgccacacattatggtcgtagagcgcgattatccggcgacttacgaacgctttacctctatcggcccgctgatggagaaaatcggtaatggcggtaaagggattgcctggaacacccagagcgagatggatctgctgcgtaagctcaactacaccaaagcggaaggtccggcgaaaggccagccgatgctgaacaccgcaattgatgcggcagagatgatcctgacactggcaccggaaaccaacggtcaggtagccgtgaaagcctgggctgccctgagcgaatttaccggtcgtgaccatacgcatctggcgctgaataaagaagacgagaagatccgcttccgcgatattcaggcacagccgcgcaaaattatctccagcccgacctggtctggtctggaagatgaacacgtttcttacaacgccggttacaccaacgttcacgagctgatcccatggcgtacgctctctggtcgtcagcaactgtatcaggatcaccagtggatgcgtgatttcggtgaaagcctgctggtttatcgtccgccgatcgacacccgtagcgtgaaagaagtgataggccagaaatccaacggcaaccaggaaaaagcgctcaacttcctgacgccgcaccagaagtggggtatccactccacctacagcgacaacctgctgatgctgactttaggtcgcggtggtccggtggtctggttgagtgaagccgatgccaaagatctgggtatcgccgataacgactggattgaagtcttcaacagcaacggtgctctgactgcccgtgcggttgtcagccagcgtgttccggcagggatgaccatgatgtaccacgcgcaggaacgtatcgttaacctgcctggtagcgaaattacccaacagcgtggtggtatccataacagcgtcacccgtatcacgccgaaaccgacgcatatgatcggcggctatgcccatctggcatacggctttaactactatggcaccgtaggttctaaccgcgatgagtttgttgtagtgcgtaagatgaagaacattgactggttagatggcgaaggcaatgaccaggtacaggagagcgtaaaatgaaaattcgtagtcaagtcggcatggtgctgaatctcgataagtgcatcggctgccacacctgtagtgttacctgtaaaaacgtctggaccagccgtgaaggcgtggaatatgcgtggttcaacaacgtggaaaccaagccgggccagggcttcccgactgactgggaaaaccaggaaaaatacaaaggcggctggatccgtaaaatcaacggcaaactgcagccgcgcatgggtaaccgtgccatgctgctgggtaaaatcttcgctaacccgcatctgccggggatcgacgattattacgagccgttcgattttgactatcagaacctgcataccgcgccggaaggcagcaaaagccagccgattgcccgtccgcgtagcctgattaccggggaacggatggcgaaaatcgaaaaagggccgaactgggaagatgacctgggcggtgagtttgacaaactggcgaaagacaagaacttcgacaacatccagaaggcgatgtatagccagttcgaaaacaccttcatgatgtatttgccgcgcctgtgcgaacactgcctgaacccggcatgtgtggcgacctgcccgagcggtgcgatttacaagcgtgaagaagatggcatcgtcctgatcgaccaggataaatgccgtggctggcgtatgtgcatcactggatgcccgtacaaaaaaatctacttcaactggaagagcggtaagtctgagaagtgcatcttctgctatccgcgtattgaagcgggtcagccgaccgtgtgcagtgaaacctgtgtcggtcgtatccgttatcttggcgtgctgttgtacgatgccgacgctattgaacgtgcagccagcaccgagaacgagaaagatctttaccagcgtcagctggacgtgttcctcgatccgaacgatccgaaagtcatcgagcaggcgattaaagacggtattccgctgagcgttattgaagccgcacagcagagcccggtttataaaatggcaatggaatggaaactggcgctgccgctgcatccggaatatcgcacactgccgatggtctggtacgtgccgcctctgtctccgattcagtctgcagcagacgcgggtgagctgggtagcaacggcattctgccagacgtcgaaagcctgcgtattccggtacagtatctggcgaatctgctgaccgccggtgataccaaaccggtactgcgcgcactgaaacgtatgctggcgatgcgtcattacaaacgtgctgaaaccgttgacggtaaagttgatacccgtgcgctggaagaggtcggtctgaccgaagcccaggcacaggagatgtaccgttatctggcgattgctaactacgaagatcgctttgtggtgccgagtagtcatcgtgaactggcacgggaagccttcccggagaaaaatggctgcggctttacctttggtgatggctgccacggtagtgataccaaattcaatctgttcaacagccgtcgtatcgatgccatcgatgtgaccagcaaaacggagccgcatccatgatcgaactcgtgattgtaagccgtctccttgaatatccggatgctgccttatggcagcatcaacaagagatgtttgaggcgattgccgcgagcaaaaatctgccaaaagaggatgcccatgcgctgggcattttcctgcgcgatttaacgacgatggatccgctcgatgcccaggcgcagtacagcgaactgttcgaccgtggccgcgccacgagtctgttgctgtttgaacatgtgcacggcgaatcccgcgaccgcggccaggcgatggtggacctgctggcgcagtacgagcagcacggcttgcagttaaacagccgcgaattgccggaccatctgccgctgtatctggagtacctggcgcagctgccgcaaagcgaagccgtggaaggtttgaaagatatcgcgccgattctggcattgctgagcgcgcgtctgcaacagcgtgaaagccgttatgccgtgctgtttgatctgctgctgaaactggcgaataccgctatcgacagcgacaaagtggcggaaaaaattgccgacgaagcgcgcgatgatacgccgcaggcgctggatgctgtctgggaagaagagcaggttaaattctttgctgacaaaggctgcggtgatagtgcaatcactgcgcatcagcgtcgctttgccggtgccgtcgcgccgcaatatctgaatatcaccaccggaggacagcactaatgcaattcctgaatatgttcttctttgatatctacccgtacatagccggggcggtcttcctgattggtagctggctgcgttatgactacgggcagtacacctggcgcgcggcgtccagccagatgctggatcgcaaagggatgaacctggcgagcaacctgttccatatcgggattctggggatttttgtcggtcacttcttcggtatgctgacgccgcactggatgtatgaagcctggctgccgattgaagtgaaacagaaaatggcaatgtttgctggtggtgccagcggcgtgctgtgtctgattggcggcgtgctgttgctgaaacgtcgtctgttcagcccacgcgtgcgtgcaaccactaccggagcggatatcctgatcctgagcctgctcgttatccagtgcgcgctgggcctgttgaccattccgttctccgctcagcatatggacggtagcgagatgatgaaactggttggctgggcgcagagcgtggtgaccttccacggtggcgcttctcaacacctcgatggtgtggcgtttatcttccgtctgcacctggtgctggggatgacgttattcctgctgttcccgttcagccgtctgatacacatctggagcgtaccggtggagtatctgacacgtaagtaccagctggtgcgcgctcgtcactaagcgaattttagttcacatagaccctgcttcggcggggtttttttatgggcacggtgcggggtgagttgtcggatgcgcttcgcttatccgacctacaggggaggatattgtaggcccggtaaacgtggtgccatcgggcaaaattagctcggagtaacaggttttgattatttaaggaagcgatggtggtgggggaaggattactcagcgctgcgcgcttcgcccttcgggtcgttgcctgcggcaacgctctcagcctggcgctcaagagcaaccttggtcgaagcttcagttccttccccgcttgggcagaatatttgattgcggatagctttgagaattccggggcttttgaaagtgatggtggtgggggaaggattactcagcgctgcgcgcttcgccctagcggtcgttgcctgcggcaacgctctctcgctgacgctcgagccgaaccttaatcgaagcttctcatccttccccgcatgggcagaatatttgattgcggattcgcttgagagttcagggacttttgaaagtgatggtggtgggggaaggattactcagcgctgcgcgcttcgcccttcgggtcgttgcctgcggcaacgctctctcgctggcgctcgagtgctaccttggtcgaagcttctcatccttccccgcatgggcagaatatttaattgcggattcgttgggaagttcagggacttttgaaagtgatggtggtgggggaaggattcgaaccttcgaagtcgatgacggcagatttacagtctgctccctttggccgctcgggaaccccaccaggggtaattcaaattttgaggtaatgcttgagatggtggtgggggaaggattattcgtcgcttcgctcctcacccttcgggccgttgcctgtggcaacgttctctcgctttcgctcgaatcgaaccttagtcgaaggttctcacccttccccgatgagtgcaaactttcacaatctcaccgaagttaccacatcgctgtggtgaattatggtggtgggggaaggattcgaaccttcgaagtcgatgacggcagatttacagtctgctccctttggccgctcgggaaccccaccacggggtaatgctttttactggcctgctcccttatcgggaagcggggcgcatcatatcaaatgacgcgccgctgtaaagtgttacgttgagaaaaatgaactggttgcgtaattttcatccgtaacggattaaaggtaaccagttatttttgctggcgattaaagaataatcgttcgattaccgtaaacaaagacgcgctgtgccagtactttgtatagtgcacgacttaagacgtttttctcgacgtcacgacctgcgcgcatcatatcttcagctgtgtaggtatgatcgacatgaataacgtcctgcatgatgattgggccttcgtccagattgtcattcacatagtgagcggttgcgccaataatcttcacaccacgttcataggcctggtgataaggacgtgcgccaataaacgctggcaggaaactatggtgaatattgatgatcttattcgggaagcgtgccacaaattccggcgttaatacccgcatatacttcgccagcaccacgtagtcaggttgataagcatcaatggcatccgccatcttttgatcgtgctcgttgcgggttaacccttcatggcttaccagctcaaacggaatatcaaaacgctcaaccagagaacgtaaagtatcgtggttaccaataactgccgcgatttcgacatccaggccgccgtaattggctttcatcaacaaatcgccaaggcaatgcgcttctttagtgaccagaatcactatccggcgacgaccggcaggattcagctcacgcacggagccttctggcaatgcgctatcgagatccgccagcagggtggaatcattaaaaatcccttccagttccgtgcgcataaaaaagcgcccggtacggtgatcaacaaattcattgttctgtacgatatttaactcgtgcttgtagcaaatattggtaatacgtgcgatcagacctttttggtccggacaaatagtacgcagaactttacgttggagactatgcattgctggaaaaaccttgttgagagtgtttgctaaaccgtaccgtcaaccattattggccgcagcactttttaaattttttaccactaccacaagggcagggatcgttgcgaccaaactgcggacgtgtaccgtcaatatagtaccattgaccgttttctttcaaaaatcggctacgttcaattattgcacctgttttaccaccttcggtaaatcgagcaacaaaactgacaaatccgatattgtcggcgtcctgccaacaatgttcaaatacggtcaatcccaaccattcagtatgcgcaaatccggccatcaattcggcacgtaacgccgctgctccacaagagggatgccaggtctttattaaataatctgcgtcttgcatcacaaaagcgcagtaacggctacgcatgagatgttctggatcaggtgcaaccttttcaccagacacataagggtggcaacataggctatactcgacagcactaccacagggacaaagctgagacacaaataatctccctggaaacaataacggcgtattaaccgcctgagtagcactatgttaaccgagcagtagcgatgtggctacgattgcattccaggggaatcttgcgggaataatgagaaagataaaaatagggctggcgctgggatctggcgcggcgagaggttggagccatattggcgttattaatgcgctaaaaaaagtgggtattgaaattgatatcgttgcaggatgtagtattggtagcctggtgggcgctgcctatgcatgcgatcgattatctgcgctggaagattgggtgacctctttcagttattgggatgttttacgcctgatggatctctcctggcagcgcggtgggttactgcgcggcgagcgtgtcttcaatcaataccgcgaaataatgccggaaacagagatcgaaaattgttcccgtcgctttgcggctgttgccaccaatttaagtacgggacgtgaattatggtttactgaaggcgatctccatcttgctattcgcgcaagttgcagtattccaggactcatggcacctgttgcacataacggctactggctggttgatggagcagtcgttaacccaattcctatttccctcacgcgtgcattgggggctgatattgtgatagcggttgacctgcagcacgatgctcatttgatgcaacaagatttgctctcctttaatgtcagtgaagaaaatagcgagaatggtgattctctgccgtggcatgcgcgtctgaaagaaaggttaggcagcataacgacacgtcgggcggtgacagcgccaacggcaacagagattatgaccacttctatccaggtgctggagaaccgccttaaaaggaaccgcatggcaggtgatccgcccgatattctgattcaacctgtttgcccgcaaatatctacgcttgatttccatcgcgcgcacgctgccattgcggccggacagctggcagtggaaaggaaaatggacgaacttttgccgttggtacgcaccaacatttgaccagaatttttatctacacttaagttaattctgacaggcgcaggtggcaatagcatgccactattgagtaaagccagtcaggggagagaacatgacgcagccattggtcggaaaacagattctcattgttgaagatgagcaggtatttcgcagccttctggatagttggttttccagtttgggagcgacaacggtactggcggctgatggggtggatgcccttgagttgctgggaggtttcactccagacctgatgatatgtgatatcgcgatgccacgaatgaacgggcttaaactgctggagcatatacgtaacagaggcgaccagaccccagttctggtgatatctgccactgaaaatatggcagatattgccaaagcgttacgtctgggcgttgaagatgttttgctgaaaccagttaaagatctgaatcgcttgcgcgagatggtttttgcctgtctctatcccagcatgtttaatagccgcgttgaggaagaggaaaggctttttcgcgactgggatgcaatggttgataaccctgccgcagcggcgaaattattacaggaactacaaccgccggttcagcaggtgatttcccattgccgggttaattatcgtcaattggttgccgcggacaaacccggcctggtgcttgatattgccgcacttagcgaaaacgatctggcattttattgccttgatgtcacccgagctggacataatggcgtacttgctgccttgttattacgcgcattgtttaacggattattacaggaacagcttgcacaccaaaatcaacggttgccagagttgggcgcgttattgaagcaggtaaaccatttacttcgtcaggccaatctgccggggcagtttccgctattagttggctattatcatcgcgaactgaaaaatctcattctggtttctgcgggtctgaatgcgacgttaaataccggcgaacaccaggtgcaaatcagtaatggtgttccgttaggcactttaggtaacgcttatttgaatcaattgagccagcgatgcgatgcctggcaatgccaaatatggggaaccggtggtcgactgcgcttgatgttgtctgcagaatgagcaaacgataacgcgggctaaatttgcattacctgctaatgtcggctggtggtactatcgtcgccattcgtataagtaattgtcttaattatgctaactcgcctccttttcagaacttagccccttcggggtgctgatatactgggatgcgatacagaaatatgaacacgttcaaaacacgaacagtccaggagaatttaaatggctgccattaatacgaaagtcaaaaaagccgttatccccgttgcgggattaggaaccaggatgttgccggcgacgaaagccatcccgaaagagatgctgccacttgtcgataagccattaattcaatacgtcgtgaatgaatgtattgcggctggcattactgaaattgtgctggttacacacagttctaaaaactctattgaaaaccactttgataccagttttgaactggaagcaatgctggaaaaacgtgtaaaacgtcaactgcttgatgaagtgcagtctatttgtccaccgcacgtgactattatgcaagttcgtcagggtctggcgaaaggcctgggacacgcggtattgtgtgctcacccggtagtgggtgatgaaccggtagctgttattttgcctgatgttattctggatgaatatgaatccgatttgagtcaggataacctggcagagatgatccgccgctttgatgaaacgggtcatagccagatcatggttgaaccggttgctgatgtgaccgcatatggcgttgtggattgcaaaggcgttgaattagcgccgggtgaaagcgtaccgatggttggtgtggtagaaaaaccgaaagcggatgttgcgccgtctaatctcgctattgtgggtcgttacgtacttagcgcggatatttggccgttgctggcaaaaacccctccgggagctggtgatgaaattcagctcaccgacgcaattgatatgctgatcgaaaaagaaacggtggaagcctatcatatgaaagggaagagccatgactgcggtaataaattaggttacatgcaggccttcgttgaatacggtattcgtcataacacccttggcacggaatttaaagcctggcttgaagaagagatgggcattaagaagtaacatccgtatcggtgttatccacgaaacggcgttgagcaatcgacgccgtttttttatagcttattcttattaaattgtcttaaaccggacaataaaaaatcccgccgctggcgggattttaagcaagtgcaatctacaaaagattattgcttgatcaggaaatcgtcgagggatttaccttgctcatccattgcttttttgattacagctggagtacggccttggccagtccaggttttagtttcgccgttttcgtcaacgtagctatattttgccggacgctgagcacgtttagctttggtgccagatttaacggcagcaaggctattcagcagttcgttcgggtcaataccgtcagcgatcagcatttcgcgatattgctgcagtttacgagtgcgctcttcaacttcagcagcagccgcgctttcttcttcgcgacgttcgttaacaacaacttctaatttttccagcatttcttccagcgtttcaagtgtacattctcttgcctgcgcacgaagagtacggatgttgttcagaattttaagtgcttcgctcattgtagtaatctcaaacttatattggggtggtttgttgaggtaataatagagccttaaattcagttgtgcaatagccaggaatgtaaggaattcaaaattgttctttattttgtgccgccaataaatatcttttcataaaattagccagaaaagacgcggcatatagccctatttacaccgatgatttcgcagcacgtgaggttaaaacttcctgattcatgtcacattttatggggagattatcgtaggctgacgacctttcagtcttctgtattagttgtgtttacgagaattccctattaagcgaatgatgaaaagtagaacagtcgcaataagagcatggacttagtattgcactatctcctggaggtcaacagagggctattacttgcgcaacaggttaaagattgtgaatagttaccagcagtcatttacccgcttataacaagcgaggcagttgtaatgatagctcagaaggattatgcaaggcttcgtaagggagaacgcatatacccacttctgtgcatactgttgagctgaaaaactgacgaattatgataaactccagccaactttatttcatatcattgagggcctgtggctgatggcacagctatatttctactattccgcaatgaatgcgggtaagtctacagcattgttgcaatctagttacaattaccaggaacgcggcatgcgcactgtcgtatatacggcagaaattgatgatcgctttggtgccgggaaagtcagtagccgtataggtttgagtagccctgcaaaattatttaaccaaaatagtagtttatttgatgagattcgtgcggaacatgaacagcaggcaattcattgcgtactggttgatgaatgccagtttttaaccagacaacaagtatatgaattaagcgaggttgtcgatcaactcgatatacccgtactttgttatggtttacgtaccgattttcgaggtgaattatttattggcagccaatacttactggcatggtccgacaaactggttgaattaaaaaccatctgtttttgtggccgtaaagcaagcatggtgctgcgtcttgatcaagcaggcagaccttataacgaaggtgagcaggtggtaattggtggtaatgaacgatacgtttctgtatgccgtaaacactataaagaggcgttacaagtcgacagtttaacggctattcaggaaaggcatcgccacgattaataagaatttctttactgacagggtgagcagggcacttttatcctgtcagttcgttttacgcacttcttccgggctatatacccttctcggcagttttttaacgccgctatacgcctcacagggctcttaagcaccgacgttgacttgtgacctgtaaagtacaatatccctgtgtttaggcgttatacatcgtcgcaaatatgatgaaggctaatgctgtcggtttatggaaaagttgctttgggtaaacaaaaaatacggccccagaagggcaatgccgttcacttaagaggagcggcactatgtttcacaggataacgggtttttgatatcttaaccgacctcggccttgatggtcgggggcgttttgttatgaacaccacttccagagcaccccgaagatgctccagtcgtttcgggatggtccctggtgacgccgtgtttcccagctctatcatttctgatgcgatattcttccacgcaggcagtagccagtggcggttacaacccttctggttcagcgtcagcagcaggtcttcgctgtaaaaaagtttatcaaacaacgtaatagagttatccgggatggtggcgagcatggagtgggccagcacagtttcgctctgccggtaaggtgcggtcacggcattcagcagaatgtgacttcccaggttcattaaggccaccagacgcataaccgggtaggcgttctgccgcttagtggatgtgttggcagacccataatattcacgcagctcgggtttatcaggtgtcctgaactgtgcgccatcaatggcaaaaagttgcaggccgtgccagtcatccttcaggtaacgttccgcgcccctgtctgtgcggtctggcggaagagccattccactggggcggcccccacgcgctgacgcgcctgggtgacagcgctgcgggccagcaggttcatccccgcttcgccatccgcgctcaggttcagacggcgaacaacatcggtaattggctcattgcaccaccatccagataaccatgtcccccggtaaacgacggcggcgaacggtcgcatgagcagaaagcgtcaggcagtgttgtatccactcggtgggaaggtgttctgcaaatagttgtgcagagggcggaggcataagcggatggtcactgaaatcgagcagatcattgagaagtggcataagaaaacggctccctgttgtggaagccgttatagtgcctcagtttaaggatcggtcaactaatccttaactgatcggcattgcccagaaggggccgtttatgttgccagacagcgctactgattaagcggattttttcgcttttttctcagctttagccggagcagcttctttcttcgctgcagtttcaccttctacataatcacgaccgtagtaggtatccagcagaatctgtttcagctcggagatcagcgggtaacgcgggttagcgccggtgcactggtcatcgaatgcatcttcagacagtttatccacgttcgccaggaagtctgcttcctgaacgccagcttcacggatagatttcggaatacccagttcagctttcagcgtttccagccatgccagcagtttctcgatcttagcagcagtacggtcgcccggtgcgctcagacccaagtggtcggcaatttcagcataacgacggcgagcctgcggacggtcatactggctgaatgcagtctgcttggtcgggttgtcgttcgcattgtagcgaataacgttacaaatcagcagggcgtttgccagaccgtgcggaatatggaactgggaacccagtttgtgcgccatactgtgacatacacccaggaaggcgttcgcaaacgcgatacccgcgatagtcgctgcactgtgaacacgttcacgcgctaccggatttttagacccttcgtggtaggacgctggcagatattctttcagcagtttcagtgcctgcagagcctgaccatcagagaactcagatgccagtacagaaacataagcttccatggcgtgagttactgcgtccagaccaccgaaagcacacagggacttcggcatgtccataaccaggttggcgtcgacaatcgccatatccggagtcagcgcatagtctgccagcggatatttctgaccagtagcgtcgtcagttacaaccgcaaacggagtgacttcagaacctgtaccagaagtggtggtgacagcgatcattttcgctttcacgcccattttcgggaacttgtagatacgtttacggatatccataaagcgcagcgccagctcttcgaagtgagtttccggatgttcgtacataacccacatgatcttcgcggcgtccatcggggaaccaccacccagcgcgataatcacgtctggtttgaaggagtttgccagttctgcacctttacgaacgatgctcagggtcgggtccgcttctacttcgaagaagacttcagtttcaacgcctgctgctttcagtacggaagtgatctgatcagcataaccattgttgaacaggaagcggtcagtcacgatgagcgcacgtttgtggccatcagtaatcacttcatccagcgcgattggcagggagccacggcggaagtagatagatttcggaagtttgtgccacaacatgttttcagctcgcttagcaacggttttcttgttgatcaggtgtttcggaccaacgttttcagagatggagttaccaccccaagaaccacaacccagagtcagggaaggtgcgagtttgaagttatacaggtcaccgataccaccctgagacgctggggtgttaatcaggatacgcgccgttttcattttctgaccgaagtaagaaacgcgagccggttggttatcctggtcagtgtacaggcaagaggtatgaccgataccgcccatagcaaccagtttctctgctttttctaccgcgtcttcgaaatctttagcgcggtacattgccagagtcggggacagtttttcatgtgcgaacggttcgctttcatcaacaacggtcacttcaccgatcagaatcttggtgttttctggtacagagaagcctgccagttcagcaattttataggctggctgaccaacgatagccgcgttcagcgcaccgtttttcaggataacatcctgaacagctttcagctctttaccctgcaacagatagccgccgtgggttgcaaaacgttcacgtacagcgtcataaacagagtcaacaacaacaacagactgttcagaagcacagattacgccgttgtcgaaggttttggacatcagtacagatgcaactgcacgtttgatatcagcagtttcatcgataacaactggagtgttgcccgcgcctacaccgatagctggtttaccggagctgtatgcggctttaaccatgcccggaccaccagtcgcgaggatcaggttgatgtctgggtggtgcatcagtgcgttagacagttcaacagaaggttgatcgatccagccgatcagatctttcggagcaccggcagcgatagcagcctgcagaacgatatcagccgctttgttggtggcatcttttgcacgcgggtgcggggagaagataatggcgttacgggtcttcagactgatcaggcttttgaagatagcagtactagtcgggttagtggtcggaacgataccgcaaataataccgattggttcagcgatagtgatggtaccaaaagtgtcgtcttcagacagaacaccacaggttttttcatctttataggcgttgtagatatattcagaagcaaagtggtttttgatcactttatcttcgacgatacccatgccggattcggcaacggccattttcgcgagtgggattcgagcatctgcagcagccagagcggcggcgcggaagattttgtctacttgctcttgagtgaaactggcatattcacgctgggctttttttacacgctctacgagtgcgttaagttcagcgacattagtaacagccataatgctctcctgataatgttaaacttttttagtaaatcatctgctcgaatacgagagtatagtcagtgcggtgatgatttgcttaacctatgaaaatcaaaagcttactcgcgctcacactcactgtgatttactaaaagagtttaaacattagagttattatctctaatgcgtcacttccaggtggcgtaagcaagattactcacttctgggtactgattacgtgatccaaatcaaatttttgcaaagctgacacctttcagcatcgcttttcgccattatagctaacagttaataaattgtagtatgatttggtggctacattagcatgttttgcacaactagataacaataacgaatgatagcaattttaagtagttaggaggtgaaaaatgctgtcaaaaggcgtattgtcagcgcgtcttttcaaccttatttatggctaacattatccggcttttgcttcggagctaaccgtgattcagaccttttttgattttcccgtttacttcaaatttttcatcgggttatttgcgctggtcaacccggtagggattattcccgtctttatcagcatgaccagttatcagacagcggcagcgcgaaacaaaactaaccttacagccaacctgtctgtggccattatcttgtggatcagcctttttctcggcgacacgattctacaactttttggtataagtattgatagcttccgtatcgccgggggtatcctggtggtgacaatagcgatgagcatgatcagcggcaagcttggcgaggataaacagaacaagcaagaaaaaagtgaaaccgcggtacgtgaaagcattggtgtggtgccactggcgttgccgttgatggcggggccaggggcgatcagttctaccatcgtctggggtacgcgttatcacagcattagctatctgtttggtttctttgtggctattgcattgttcgctttatgttgttggggattgttccgcatggcaccgtggctggtacgggttttacgccagaccggcatcaacgtgattacgcgtattatggggctattgctgatggcattggggattgaatttatcgttactggtattaaggggattttccccggcctgcttaattaattcctttcaaatgaaacggagctgccatgctccgtttacttcgtcattatttttactttgttcccgcgcagttatcaaaagcaaaaggaataggtaaaaatattcttctcaaattacagttagttataaggatttccttaactgcttctcctcaccatcatgttattttcgccacatcataatcctgggcttgctgaagaataattgaaatgatattattaattccactgcctttggtagaggaaagtgctaaataataatcaattgttaaattattgtgcatttcactactggaactgtaatcagaaaagatagacatgcttagccaatctctatttgattgaattgaaagatgtttgttaaggcatggatgcaagctatagattctgatacggtcaataaaagagaattgcttaacaattttgcaaaatgtattggcgagtaagaaccgcatttggtactttccgggcaaccgccagacgattctttattggtaatgagaataattaacaattaaagagcgtcgcgaaagaataatgtgtctcgacaggggagacacagtacgaatcgacataaggtgatcgtctgaatcaccagaataaataaagtcggtgatagtaatacgtaacgataaagtaacctgacagcagaaagtctccgagcctgtgcagggtcccaatccgggattacacatgctggttaataccagtaattataatgagggagtccaaaaaacaatgaccaacatcaccaagagaagtttagtagcagctggcgttctggctgcgctaatggcagggaatgtcgcgctggcagctgatgtacccgcaggcgtcacactggcggaaaaacaaacactggtacgtaacaatggtagtgaagttcagagtttagatccgcacaaaattgaaggtgttccggagtctaatatcagccgagacctgtttgaaggcttactggtcagcgatcttgacggtcatccagcacctggcgtcgctgaatcctgggataataaagacgcgaaagtctggaccttccatttgcgtaaagatgcgaaatggtctgatggcacgccagtcacagcacaagactttgtgtatagctggcaacgttctgttgatccgaacactgcttctccgtatgccagttatctgcaatatgggcatatcgccggtattgatgaaattcttgaagggaaaaaaccgattaccgatctcggcgtgaaagctattgatgatcacacattagaagtcaccttaagtgaacccgttccgtacttctataaattacttgttcacccaagtactagtccggtgccaaaagccgctatcgagaaattcggcgaaaaatggacccagcctggtaatatcgtcaccaacggtgcctataccttaaaagattgggtcgtaaacgaacgaatcgttcttgaacgcagcccgacctactggaacaacgcgaaaaccgttattaaccaggtaacctatttgcctattgcttctgaagttaccgatgtcaaccgctaccgtagtggtgaaatcgacatgacgaataacagcatgccgatcgaattgttccagaagctgaaaaaagagatcccggacgaagttcacgttgatccatacctgtgcacttactattacgaaattaacaaccagaaaccgccattcaacgatgtgcgtgtgcgtaccgcactgaaactaggtatggaccgcgatatcattgttaataaagtgaaagcgcagggcaacatgcccgcctatggttacactccaccgtatactgatggcgcaaaattgactcagccagaatggtttggctggagccaggaaaaacgtaacgaagaagcgaaaaaactgctggctgaagcgggttataccgcagacaaaccgttgaccatcaacctgttgtataacacctccgatctgcataaaaagctggcgattgctgcctctagtttgtggaagaaaaacattggtgtaaacgtcaaactggttaaccaggagtggaaaacgttcctcgacacccgtcaccagggtacttttgatgtggcccgtgcaggctggtgtgctgactacaacgaaccaacttccttcctgaacaccatgcttagcaacagcagcatgaataccgcgcattataagagcccggcctttgacagcattatggcggaaacgctgaaagtgactgacgaggcgcagcgcacagctctgtacactaaagcagaacaacagctggataaggatagcgccattgttcctgtttattactacgtgaatgcgcgtctggtgaaaccgtgggttggtggctataccggcaaagatccgctggataatacctatacccggaatatgtacattgtgaagcactaatggcaatacgtggggcaggagtgtcctgctccacggtgtctgatttttatcgcattacagaaggcacaggccagaaggtagggcaatgttaaaatttattctacgtcgctgtctggaagcgattccgacgctatttattcttattactattagcttctttatgatgcgcctcgcgccgggaagcccttttaccggcgaacgtactttaccgccagaagtgatggccaatatcgaagcgaaatatcatcttaatgatccgatcatgacacagtatttcagctacctgaaacaactggcgcacggtgatttcggtccaagctttaaatataaagattatagcgtcaatgacttggttgcatccagttttcccgtttctgccaaactgggagccgcagcatttttccttgcggtaatactgggtgttagtgctggcgttattgccgcattaaaacaaaacaccaaatgggactataccgtgatggggctggcaatgaccggggttgttatccccagttttgtggttgcaccattattagtcatgatatttgcgatcattttgcattggctgccgggcggtggctggaatggtggggcgcttaaattcatgatattgccgatggtggcgttgagtctcgcttatatcgccagtattgcgcgtattacccgtggctctatgattgaagtattacactccaattttattcgtactgcccgggcgaaagggttacctatgcggcggatcattttacgtcacgcattaaaacctgctctgttacccgtgctctcttatatgggccccgcatttgtcggcattattaccggttctatggttatcgaaaccatttatggtttgccggggattggacaactgttcgttaatggcgcattgaaccgtgactattccttagtgttaagcctgaccatcctggttggtgctttaaccattttgtttaatgccattgtcgatgtgctatatgcggttatcgacccgaaaatccgttactgatactggagctcgcgatgatgttaagtaagaaaaacagcgagacgctggaaaatttcagtgaaaagctggaggtcgaagggcgcagcttgtggcaggacgcacgtcgacgttttatgcataaccgtgcggcggttgccagtctgatagtgctggtgctgatcgcgttatttgtaatcctggcaccgatgctttcccagtttgcctatgacgatactgactgggcgatgatgtccagcgccccggatatggagtccggtcactactttggtactgacagttccggtcgcgacctgcttgtgcgcgttgcgattggcgggcgtatcagtctcatggtcggtgttgctgcggcactggtggctgtggtcgtcgggacactttatggtagcctttccggttatctgggcggtaaagtggatagcgtaatgatgcgtctgctggaaatcctcaactccttcccattcatgttcttcgtcattttgctggtgacctttttcggtcaaaacatcctgctgattttcgtggcgataggcatggtttcctggctggatatggctcgtattgtgcgtgggcaaaccctgagtctgaagcgcaaagagtttattgaggcggcacaagttggcggtgtaagcacaagcggcattgttattcgccacattgtgccgaatgtactcggtgtggtggtggtctacgcaagtcttctggtgcccagcatgatcctctttgaatctttccttagcttcctggggttgggtacgcaagagccgttaagcagctggggtgcattgctgagtgatggcgcgaacagcatggaagtctctccatggttattgttgttcccagcgggattcctcgtggtgacgctgttttgtttcaactttatcggcgatggcttgcgtgatgccctcgacccgaaagatcgttaaggagtgcagccatgagcgtaattgaaactgcaactgtgccgctcgcacaacaacaggctgacgcactgctgaacgtgaaagatttgcgtgtcacctttagtaccccggacggcgacgtcacggcggtcaatgatttgaatttttccctacgtgccggagaaacgctgggtattgtaggtgagtctggtagcggtaaaagccaaactgcatttgcgttgatgggcctgttggctgccaacggacgtattggcggaagcgcaaccttcaatgggcgtgaaatcctcaatttgccagagcatgaactcaataaactgcgcgctgaacaaatcagtatgatttttcaggacccaatgactagcttgaatccctatatgcgcgtcggtgagcagttgatggaagtgctgatgctgcataagaacatgagcaaagctgaggcgtttgaagagagcgtgcggatgctcgatgcggtaaaaatgccggaagcgcgtaaacgcatgaaaatgtacccgcacgaattttctggcggcatgcgtcagcgagtcatgattgcgatggccttgttatgtcgacctaagctgctgattgcggatgaaccaacaactgcgctggacgtcaccgtacaggcgcagatcatgacgctattaaatgaactgaagcgggaatttaataccgccatcattatgatcacccacgatcttgtcgtggtggcggggatctgcgacaaagtgctggtaatgtacgccgggcgcacgatggaatatggcaacgcgcgcgatgtcttttatcaacccgttcatccttattctatcggtttgctcaacgcggtgccgcgtctcgatgcggaaggtgaaacaatgttgaccatcccgggtaatccgccaaacctgctgcgattaccgaaaggttgcccgttccagccacgttgtccgcatgcgatggaaatttgtagtagcgcaccgccgctggaagagtttacgcctggccgtctgcgtgcttgctttaaaccggtggaggaactgttatgaatgctgtaactgaaggaagaaaagtcctccttgaaatcgccgatcttaaagtgcactttgaaatcaaagatggcaaacagtggttctggcaaccgccgaaaacgctcaaagccgtcgatggtgtcactcttcgcctgtatgaaggggaaacattaggtgtggtaggggaaagcggatgcggtaagtccacctttgctcgcgccatcatcggtttggtcaaggcgaccgacggtcatgttgcctggttaggtaaagagttgctgggcatgaaacccgatgaatggcgtgccgttcgcagtgatattcagatgattttccaggatccgttggcaagcctaaacccgcgtatgaccatcggcgagatcatcgctgaaccactgcgtacttatcatccgaaaatgagtcgccaggaagttcgcgagcgcgtgaaggcgatgatgctgaaagtcgggttattgcctaacctgattaaccgctatccgcatgagttctctggtgggcagtgccagcgtatcgggattgcgcgtgctcttattcttgaaccgaagctgattatctgtgatgagccggtgagcgcgctggacgtgagtattcaggcacaggtggtcaacctgctccagcaattgcaacgtgagatgggattgagtttaatttttatcgctcatgacctggccgtggtaaaacacatttccgatcgtgtgttggtgatgtatctcggccatgcggtagaactggggacctatgatgaggtctaccacaatccactacatccttacaccagggcattgatgagcgcagtccccatacctgatccggatctggagaagaacaaaaccatccagttactggaaggggaattaccgagcccgatcaacccgccttccggttgtgttttccgtacccgttgcccgattgccggtccagagtgcgccaaaacacgtcctgttctggaggggagtttcagacactccgtttcttgcctgaaagtcgatccgctttaaaaacaataagggctgacagttgtcagccctttttcacgctaaaagcgattatttattcccgccagatgatatggcaaagtttgtgatctttttcgcggcataacagaatgcgggcaaaaacatcgttgatttcaccatcttcactgtccgccagaccaatcaccacttcggcaaaaaagtccgggttcaaatcgaaatcaacatgttcctgccagtcttccgccggatcgaataactccgcgccgccgcgctcttcaaactgaagattgaacagcagaacatcagctggatcgagattgtcggcagccagttcgagaaaaatatcgtaggcctgttcaagcgtttcatcttcagtcaggcgattgtttagatccatatccatagttactacctgtttaacctctgttggcgacgttttacagcaacggactgaagaagtaaaacagtcgctcggcgacacgttgccataatggacgttttagccataaacgggcatcgagcagacgactacggctaatataatcgtcctgaacggcggcgaggtcagcaccaaaacctttatcgtcgattgccagggtaatctcgaaatttagccacagactacgcatatcaaggttaactgtgccaaccagacttagttcgccatcgaccagcacgctcttggtatgcagtaacccgccttcaaactgataaattttaaccccagcagccagcagttccgtaaagaatgcgcgactggcccagccgaccagcatgctgtcattttttcgcggaaggataatactgacatccaccccgcgctgcgccgccgtgcaaatcgcatgaagtaaatcatcgcttggcacaaagtagggcgtggtcatgatcaaatattcacgcgcgctataagccgcagtcaataatgcctggtgaatgagatcttccggaaagccggggccagaagcaattgtgtgaatggtgtgaccgctggcctgttcaaacggcataatattgacatctggtggtggcggcagaatacgttttccggtttcaatctcccagtcgcaggaataaataatccccatcgcggtggcgatagggccttccatacgcgccatcagatcaatccattgccctacgcccgcatcttgtttgaagtagcgaggatcgaccatattcatgctgccggtgtacgcgatgtaattatcgatcatgatcatcttgcgatgttggcgcaggtccatacggcgtaaaaacacacgcatcagattgacctttaaggcttcgaccacttcaataccggcattacgcattagctcgggccacgggctgcggaaaaaagccacactcccggcggagtcgagcatcaatcggcaatgaatgccgcgtcgcgcagccgccattaaactttcagccacctggtccgccatgccgccgggctgccagatataaaacaccatctcaatattatggcgcgcgagctggatgtcgcggattaacgcctgcatcacatcatcactctcggtcatcagttgtagctgattccctttgaccccagcgatcccctgacgacgctcgcaaagcttgaataatggcgcagcgacactgctattttcttcggcgaagatatgcttacaggctttaaggtcgttaagccattttgcggtggaaggccacatcgctctggcgcgctcagcgcggcgtttgcctaaatggagctcgccaacggcaagataggcaataattccgactaacggcagaatgtaaataatcaacagccaggccatcgcggagggaactgcgcgtcgtttcattagaatgcgtaaagttacgcctgcaatgagcaaccagtatcccagaatggccaaccaactcaccaacgtataaacggttgtcatagattagaaatccttttgaaagcgcattgttatgagtttacgcatatggattcatctggcaaataaaaacgcgggaaaagcactggtcagcgtcgggggtgggggtataatgaccattctgttattgcatagagtagttaacatgaagcggagtagaacggaagtggggcgctggcgcatgcagcgtcaggctagccgacgtaaatcgcgttggcttgaggggcaatcgcgccgaaatatgcgtatccacagcatcaggaagtgcattctaaacaaacagcgtaactcgttattgtttgcgatctacaatatctaaatgtactgggcaccattgcggtgcccaataagtttactcttccgtctttaaactttatttttgcgcgctttctttactgtcagctttcgtttctagttcatcgttatcgctgaaaataccatgaccactgttcaacaacatactaacgagcatatcattattaatctcttcaccatttaaaactcgcgccagaatttcgctgccaaacagttgcggactgagaatgatatccggatgtaccatcttaatcttattcaggtttttgctatcactgacggcgagaactgttttgacatcactgctcatatcttttgcgctgagtacaacaaacgcgttatctgcatcgttatcactcagcgccagaatggcccggcaacgatcgattcccgctttctttaatacagaactgtcattactgtcaccggggataacatcagcattatcgcctaagcgttgctcaagttgcttgatatcatcttcaggcaagttgctgataaccgttacgttttgtccgcgttgattcagttgcaggatcgtattgatggcgagaatgctatgtccgcaaacaataaaatgatctttacgatgcattgtatgattgtttccttttacaagtttgttgaatcccccgcggataagcggaccaaaaatactggtcatagatgtggcaaaaacggtaatgccggaaataatgacgctaatagtgaacaatcgtgcactttcagaaacagggacaatatcgccatagccgacggtactcatggtttctatgctaaaatagaacgcggtcatcaaactttctattcgcggattaaaaccttcgcttaaataaagcgcaccgtaggtactgtaaaacagtaatgtcgtgaaactaataaatgcaaaaattgtcccggctgcggcgctactgtgggagaagtctttgcgcagtatcagcaaaaacaccagcgtaaaaatgcaaaatccaatactaaatttcagccagggataaaaatgcagggtgtaaattagcgctatcaacaacaaaatgatactgattgcccatgcgagctttgcccggaacagtaagccaatggagttcaggacaagaaagacgccgagcataaagagtggggcgtttgccagcaaggagagatccaactcactaaatgctttgatatggaaaatatcaagcaaattgacgctcataccatagattgttttaaaaataagcaatccatttaaaaagacggccagcgcgagaatgtcgtgccgaagggtcacccataaatttgttgctgtttgtttgaatgtagcccagtgactcactgatacctctgtaaccacaattttgtttaattatcttagcgtgcacattttctgaacatacatgcagcgcgtgaatgtgttaaacaatagtagatgactttatccgcagtaatcaaaggatttgagcgagcaactgtacctcaggaaaggtcatttttcctgaatatgctcacatcatataaagaaatacagataaagttattatctgcttgtggtggtgaatgcactgaccggctataaggaaaggccaaacaagaacacggttgcaaaaaccgtgcccttaaatattgaatctctattcagaacactttcttaaatggtttcacactaacgtgttcatagactcctgccgctacgtacgggtcagcatcggcccaggcctgagctgcttccaggctttcaaattcagcaataacggtactgccagtaaatcccgcagcccctggatcgttactgtctaccgctggcattggaccagctgtcaacaaacgaccttcatcatgcagtaactgtaaacgtgctaaatgtgccggacgaacggaaaggcgtttttcgaggctatcagctttgtcttgagcgtaaataacatacaacacgggcacaactccttgttcgggaaagttgtaaagtacgttatttgaaagggcgaagatctgcaacggaaagatgatgtctttgttaaggccatgcataaagtaagggtaattacgccaaaaatgacattttcactgatcctgatcgtcttgccttattgaatatgattgctatttgcatttaaaatcgagacctggtttttctactgaaatgattatgacttcaatgacccttgatttacctcgccgcttcccctggccgacgttacttagcgtctgcattcatggtgctgttgtggcgggtctgctctataccagcgtacatcaggttattgaactacctgcgcctgcgcagccgatttctgtcacgatggttacgcctgctgatctcgaaccgccacaagccgttcagccgccaccggagccggtggtagagccagaaccggaacctgagccgatccccgaaccgccaaaagaagcaccggtggtcattgaaaagccgaagccgaaacctaagccaaaaccgaagccggtgaaaaaggtacaggagcagccaaaacgcgatgtcaaacccgtagagagccgtccggcaagtccgtttgaaaatacggcaccggcacgcctgacaagtagtacagcaacggctgcaaccagcaagccggttaccagtgtggctagtggaccacgcgcattaagccgtaatcagccgcagtatccggcacgagcacaggcattgcgcattgaagggcaggttaaagttaaatttgacgttacgccggatggtcgcgtggataacgtacaaatcctcagtgccaagcctgcgaacatgtttgagcgtgaggtgaaaaatgcgatgcgcagatggcgttatgagccgggtaagccaggcagtgggattgtggtgaatatcctgtttaaaattaacggcaccaccgaaattcagtaagcagaaagtcaaaagcctccgaccggaggcttttgactattactcaacaggtaaggcgcgaggttttccttcaggatcaaccgcgacatacttaaataatgcttctgtcgctttatagcgttgcccaattggttcagacgctacttttttcacccacacttcaatattaatgctgacgcttgtcgtccctttctggacacagcgtgcatagcagcacaccacatcgccgaccgcaaccggccgtaagaaagtcattccttcaacccgcacagtcactacgcgaccgtgggcaatttcttttgccagaatagcgccgccaatatccatttgactcattaaccaaccaccaaagatgtcaccattggcattggtatcggcgggcatggctaaagtacgtaaaacaagatcgccctgagggacgttatgtgttgtagacatggtaaaaccgacttaaaaggaaaatcacaggcgcgatgctactatgattttcctgaggagaacagaggagatacagcgccagccccgaaggactggcagtctggttaggatttatcttcctgcggcatgtggcggtagatatagataccgcttaacaatgtgaagattaaggtaagggcggtcaggccaaagactttaaagttgacccaaatattttgcggcagccagaatgcgatgtagatgtttgccagaccgcaaaggataaagaaaacagcccaggccagattcagcttgctccataccggttgcggcagcgtgagttctttacccagcatccgctgaattagcggctttttcatcacccattggctgactaacagggctcccgcaaatagagcataaatgacagtaaccttccatttaataaactcatcattgtggaagaacagcgtcaagccaccgaagacgaccaccagaacaaaagtgatcagggccatcttctcaaccttacgaaagcgaacccagctatagataagcacaatcgccgtggcgacgatcagcgccgcagtagccgcatagatgtcataaatcttgtaaaacgcgaaaaagacaaccagcggtaaaaaatcaagaaactgcttcattttacgattccgtaatcaaatgcttaaggttattggcgaatcaacatatacaggcggaacagatagatgagcaatatggcactaatcaggttgctcaaggtgttcgccagtacggcaccaatttccggggttaatgcggcaaaagaagaggcaaaaagcagcaacagtgtttttgccagcaaccagctcagtactgcgggtgccaccagacgcatattcgcccaagtcagccgcatactgctacgcatgctggcaaaaacgcccattttgtcctgtaccaacatcaccggtgccagggccagtaaaatggccatgataattcccggaacgaccaccagcatgatgccaatctgtactaaaagggtagtcagaaaaatcagaataaataactttggcaatatcggcgcactggcaccaatagctcgcagcgcactgactctctgacccgcagacaccagctggataattaatattacgcctccggcgagaatggcgttaccgattaatccactaaaagtggacgccgcactagcctgcagcaaaatttgttgctgttccggactcatattctgaaccaggtcgaacaacccactactgccgctaacgggcacgccgtcattgagctgcgcaagctgtgcatcactgggactgaaaacatgccctaacaccactgtgataaacgcacatagcaagcttaccaacagaatggtcataaattgattacggaagaaatttccggtgtcacggtatacggactgcgccgtgatagacatgcactctccttgagttttatgcaggtgttaattagcgggcaattgtaccctggttaagcctcgggtggcagcatcaggtcttgtatggaaaagcatatctttgtaaagcggaggtaattgctggccttcaggcatgggcaaatcgcggcaagtggcgaccgagttaatatttgcgtagcgaaaatatttaaaaattgatttaaatcacattaaccaggattctcaatgcaacttctaaattaatccagatcaataaagggtgaattatcatatgtaatgtgatctatgtaggatcatttgttactccaatgtaggtatattcgtcacgtttttataaccataacgacggagcggatatgaaaaagttaacagtggcggctttggcagtaacaactcttctctctggcagtgcctttgcgcatgaagcaggcgaattttttatgcgtgcaggttctgcaaccgtacgtccaacagaaggtgctggtggtacgttaggaagtctgggtggattcagcgtgaccaataacacgcaactgggccttacgtttacttatatggcgaccgacaacattggtgtggaattactggcagcgacgccgttccgccataaaatcggcacccgggcgaccggcgatattgcaaccgttcatcatctgccaccaacactgatggcgcagtggtattttggtgatgccagcagcaaattccgtccttacgttggggcaggtattaactacaccaccttctttgataatggatttaacgatcatggcaaagaggcagggctttccgatctcagtctgaaagattcctggggagctgccgggcaggtgggggttgattatctgattaaccgtgactggttggttaacatgagtgtgtggtacatggatatcgataccaccgccaattataagctgggcggtgcacagcaacacgatagcgtacgcctcgatccgtgggtgtttatgttcagtgcaggatatcgtttttaattccgcacaaaaacgaccccgtaatatacggggtcaataaggacatggtataaagggtattatttcttcgcttctacgccatcagtttcagagcgaattaaaaatttctcagttgtttgcggaatattctgaatcagccagtcggccatttgcttttcctcatttaaaatcgcttcgatggttggaatactagctgtatcaccggcattttttgctgctgctaatagactggtgtaacaggcgatttcaaattgctcgaagacatatccgctaatagagcctttgactatttcatcagaagggaatataccaccgatactctgcccaagcgcagccattttactcatggaatctttaatgacactacgactaatgtcattacgatcaagaatagtttccagttgaacaatctggtttttggtttcactaagatgttgttcaatacgagcgcgtagttcaggataattatctatacggctggccatggattcaagcatagattcggcttgcttttccattgcgtgggcgtcacgtaaccagtcatgataatgttcaatacgattcatgaaaatgtcctctttataaaatgactaaaagttaaaattcatatttcaggctttattttcggctttcttatttacgttattaatggccagatcagtcagtttgatgtcggtggccttttcttcttccagggtttctttcagaagcttcgctgctttacggtaacctaattgttcagccagcgtcgctaatgtcccgtaactggcaatctcataatgctcgactttctgtgctgcggcaatcagtgcggcatcacgcacttcgtttttctcggtactttcgatgacctcattagcttcttcaataagaccttccattgccacacatttcatgcgcttaattttcaggttgctttcggactccacaacttgatcaatacgttcaatctgtccatgagtttcctcgaggtgcgcatgaaaagcctgacttaatttttcattacttgttgctcttgcgagttttgccagtgcccgggttaattgtttttctgcgctgtaggtatcactaagcaggtgaataaatacatcttcaatggtcttcatattcatatttttctccagtgaaatcactgcgagccatacggcccgcagatgcaattatctttatcagctgatattaataattaacggtgaatcaggatttgccacttttattaccaccgctttgttgaccgccttttttacccgcttcagatgcgcgttgcggatcatttttaaaattaccgccgctatgctgaccgcctttacggcctgcgtcggatgccttctcacggtcttcggcgaaatttccactaccaccacgatgttcggccatgttatttctcccgttgcgttgcattgtttcattaatatgagtgttgtgtgtcgacactcattaaaattagtcgctaatgagaattagtcaaattaagcgcaacgagaagatagagggaaaatatattttgaggaacattctggatatattaacaattacctgaggaataagtgacttagagaaaattattgattttactggtgttatgttgcgggattaatttgtttgattatattactgttgggcggaaaaatgacgtaagttgacgttcgaccggggtaagcgaaacggtaaaaagataaatattaaatgaatttaggatttttccggcttcattaaagaaagttaaaatgccgccagcggaactggcggctgtgggattaactgcgcgtcgccgctttcatcggttgtacaaaaactttcagtgccgccagcattttctctggctcattaatatgttgctcgatgattttaacaatggcgctaccagaaatcgcgcccgcagctcctgcatcaatcgctgcttttacctgatccggggcggaaataccaaatccctgcaatggaggtgcagcgttgtactctttcagcttcgcaaccagatgattgaggggtaacgcggcgcggttttctgcgccggtcacgcctgctcgactcagcaaataggtgtaaccacgaccgtaagaggctatctggcgcagcaggtcgtcatcggcatttggcgggcagatgaagataggtgcgacattatgacgcaacgcggcctggcggaagggcgcggactcttcaactggcacatcggcaaccagcacgctatcgacgccgactttttcgcactgggcataaaactcatcaatgcctttgttaaacaccagattggcatacatcaacaggccaatgggaatggtcgggtgtttctggcgaatcagtgccagcatttcaaaacattgtgccggagtcacacctgccgcaaaggcgcgcagagtggcgttttgaatcgtcgggccatccgccagtgggtcggagaaggggatacctaactccagcgcgtcagcaccggcttcaattagcgtatcgataattttcaaactctgctcaatgcccggatcaccgagcgtgacgaaaggaacgaatgcgccttctttgcgctccttcaactgggcaaacagagattcgtagcgttccatcagatttcccctcgtgctttcaaaatatcgtgaacggtgaagatgtctttatcgccgcgaccggaaaggttaaccaccagtagctgctctttatccgggttttcgcgcatcattttcaacgcatgggccagggcgtgggaggattccagcgccgggatgatcccttcgtgcaggcacagcgttttgaaggcttcaagggcttcatcatcggtaatagacacgtaatcagcgcgtccagtgctgttaagatacgcgtgttgtgggccgacagacgggaaatccagtccggcggagatggagtaagattcttcaatctgcccgtcttcggtttgcatcatcggcgctttcataccgaaatagatacccacgcgaccatgttttagcggtgcgccgtgctcgccagtttcgataccgtgaccacctggctccacaccaatcaggccgacgttggtttcattgatgaaatcagcaaacatgccgatggcattgctaccgccgccaacacaggcgataacggcatccggcaggcgaccttctctttccagaatctgcgctttggtttcttcgccaatcatccgctgaaactcacgcacaatggtcggataaggatgcgggccagctgcggtgcccagcatatagtgcgcggtttcgtaactaccggaccagtcgcgcagcgcctcgttacaggcatctttcagcgtcgcggaaccgctatgcaccgggatcacttccgcacccattaagcgcatacgaaaaacgttagggctctggcgttcaacgtctttggcacccatataaatacggcatttcaggccgagcagggcgctggcaagggcgctcgccacgccatgctgaccggcaccggtttcggcgatgatttcggttttacccatccgcttcgccagcaacgcctgccccagcacctggttagttttatgcgcgccgccgtgcagcaaatcttcacgcttgagatacagcgtggtgttcgtcccggctgtaatgttctggcatttggtcagcgcggttggacgcccggcatagtttttcagcaggtcgttgaactgagcctgaaattcaggatctttttgcgcactgacaaaagcttcttccagctggcgcagagcaggcatcaggatttgtggcacgtacatgccgccaaactcaccaaaataggggttaagtaatgttgtcattgttcctttccttaatatgcgcgcagcgtctggaaaacgctggccaaaagacgtgcgtctttgatgcccggttggctctctacagcagaattaaaatcaagtccggcgcagccggtttgtgccgcttccacgcagttatctgcgcctaagccccccgccagcagaacgttgccaaggctttgaccatttaatagactccagtcaaaacgttgcccgcttccaccctggccgttgtctaaaacatatttatcaacgtgctgaaactcgcgggcgggcagggtttcaccgacgcttaatgctttccagatggcaacatgtgctggcagagcttcacgcagcgtatcgatatacagctgttcttcattaccatgcagttgcactgccgccaggcttaacaccttagctttgtccaccacatcggcaatatcgtgattgcggaacacgccaacatactgcaacggtgccgcagccatcacttcctgcgcctgttcaacgttgacgcaacgcggacttgtcgcaacaaaaatcaacccaccgtaaatcgcgcccgcgtcataagctgctttagcatcttgcccacgcgtcaggccacatactttattctcacccagcaacacccggcgcacggcggcgtgcaaatcgtcatgggccatcaacgcgctaccaatcagaaaaccgttagcgaagtggcttaactcgcgcacctgagcgtaagtattgatgccggattcgctgattaccgtcacgttgtgccccagtttcggcgcaagctcgcgggtacggttgagatcaatgctcaaatcacgcagatcgcggttgttgatgccaacgacctttgctcccaatgcaatggcgcgctcctgttcctcttcattactgacttcggtcagcacccccatctccagactgtgagcgacggcggcaagctggcgatattggtcgtcatccagtacactaagcattaataagcaggcatcggcctggtaatagcgcgccagatagatctggtaagggtcgataatgaagtctttacataaaatcggctgcggggcgatttggctgacgatggggaggaaattaaagctcccctgaaaatatttctcatcagtcagcacgctaattgcgctagcgtaatgtttataaatggcggcaatgcgtgctggatcgaaatcatcacggatcacgcctttactcgggctcgctttcttgcactccagaataaacgccgtgcgcgcaccctgtagcgcatcataaaaatgtcgcgtgctcggctgaacctcattctgaaaactggccagcggttgctgctgtttgcgggcttctacccaaatcgccttgtctgcgacgattttcgctaaaacggtttgcatcatttaccctcgtgccgccagtgcggtgactctgtcgtaagcggaaccactgcgcagtacctcaagaacggtttgcgcattggcttgcagatcttcatggccatgcaggcgcattaacatggcgacgttcgcagcgacggctgcttcatgggcggcgtcgcctttaccttgtaacaaacgtgttaaaatgtcacggttttcttccggtgttccgcctgccagttgctcctggtggtagggtgtcaggccaaagtcttctgcggtgagctgatagcttttaatttcgccgtcatgcagttcggcaacgattgtcggcgcgtgtaaactaacttcatccatcccgccgctgtgcaccaccgccgcgcgttgataccccagcacgcgcaaggtttcggcaatcggcagcaccagttccggactataaacaccaattaacgccagcggcggatgcgccgggttaatcaatggccccagcacattgaacagggtgcgggttttcagttgctggcgaaccggcatcgcgtggcggaatccggtgtgatacttcggcgcaaagaggaaacatacacctaactcatccagcgcctggcggcttttatcggcgttcatatcaagattaataccgaacgccgccagcagatcggagctaccagatttactggagacgctacggttgccgtgtttcgccactttcagcccacaggccgcggcgacaaacgcactggcggtagaaatattgatactgttgctgccgtcaccgccagtaccgacgatatcagcaaacagataatccgggcgcgggaacggcgctgcgttttccagtagcgcggttgctgccccggcgatctcgttcgggtgctcaccgcgaattttcatgctcaccagcgccgccgccagttgttccggcttcagctcgccacgcaccaccgcactaaacagctggtggctttcttgttggctaagcgtctgcgcctgatacagtttttccagaatcggttgcagcgtgttggctggctctagtttctgctgcgcccaggccagcgtttgttccagcaggcgagcgccctgggtggtgagaatggattccggatggaactggaatccacaaacgcgatccgcatcgtgacgtactgccatcaccatgccattaaaatgggcgttgatggttaaaccggccggaatgttactgccaaccaggctgtgataacgcgccaccggcagcgggtttgttaatccggcaaacatcgcctgaccgtcatgttcaatgctggaggctttaccgtggagaatttcgcccgcctgaccgacatagcccccgtaagcttcgacaatcgcctgatgtccgaggcaaatgccaataatgggcagcttgccacgcaagcgggtgaggagttccggcatacaaccggcttcgctcggcacaccggggccaggagaaagcatcagcaccggattgctcatggtcgccaggcgttcaattaaggtttgcgccggaatatggttgcggtaaatcaccacgttatgcccattgctgcgcaactgatctgccaggttgtacgtaaaagagtcgatattatcgagcagcagaatgtcagccatcagaaagtctcctgtgcatgatgcgcggtggcaatagcgcgcagtacagcgcgggctttgttacgggtttcgtcggcttcgctctgcggaacagaatcaaggactacaccagcacccgcttgcacggtggcgataccgttttccaccagcgcgctgcggatcacaatgcaggtgtcgagatcgccatgcgcggtgaaataacctaccgcgccgccgtagctgccgcggcgacgaccttccgcctcggcaattaactgcatagcgcgtactttcggcgcaccgcttaacgtccccatattcatacaggcgcgataagcgtgcagggcgtcaagatcgtgacgcagttcgccgactacgcgagagacgaggtgcatcacataggaataacggtcaactttggtgagatcggcgacgtagcggctgccgggggtgcaaatgcgtgccagatcattacgggcgagatcaaccagcatcagatgttcagacagctctttatgatcggtacgcatttccagttcaatacggctgtcgagatctctgtccagactaccatcggcgcgacgaccgcgtgggcgtgttccggcaatcgggtagatctcaatctggcggctggtggcatcatacttgaggctgctttccgggctcgcgccaaatagggtgaaatcattatcctgcataaaaaacatgtacgggctgggattactctttttcagcacgtaataggccgccagcggactcgggcagggcagagagaaacggcgagatggcaccacctggaaaatttctccagcgcgaatcgctttttgcaacaaacgcactacgccaccgaactcttcatcgctctgattacattcacaacgcatatgcggcacggaaaccactggcagcggcggcgcggcttcggtcagttgctgacgtagttcgttcaggcgagcagtgagacgttgtttttcttcttcattcggagcaaacaggctggcctgaatacgggtgctttttttctgatggtcaatcaccatcagcgtttcagcgagataaaaacagaaatcagggcagttattttccgcactcagttgcggtaaatcttcaaatcccgccacaaggtcataagagaacaggccgccgaagaacatggcttctcgttcttccttcggtacattcaacagattctgcaataaacggaaagcgtcaaaaacgctaagggagcataagcgggcgtcttcatccagcagtggactgacaggggggaagcgcagcacacggcagtttggactttgttcactttccacacccgcaggcagggcgttatccagtagtgccaggagggcttcgccgttgccggaaagtgcctggattgtgacagtgtcacctaaagctgtaatgcgcagcgcactgtctaccagcagcaggctttttaaatcatctttgctgtcgatatctgcggattccagcagcagcgttgccggacgatccccacacaactggtgaaaaagcgcggtgggattgtcgcgataagcgccttcgcaggttagcagttcgagagtcggtttttgtgtttgcattgttattctctaattttgttcaaaaaaaagcccgctcattaggcgggctgggtatctgattgctttacgcatggtgaatacactgcccgtttcaggaagtgcgccaccaacctttcagtacgaaaattgctttcattgtcgataccctttttacgtgaacttgcgtactagttaactagttcgatgattaattgtcaacagctcatttcagaatatttgccagaaccgttatgatgtcggcgcaaaaaacattatccagaacgggagtgcgccttgagcgacacgaattatgcagtgatttacgacctgcacagccataccacagcttccgatggctgcctgacgccagaagcattggtgcaccgtgcagtcgagatgcgcgtcggcaccctggcgatcaccgaccatgacaccacagctgcaatcgcgccagcaagagaggaaattagtcgtagcggactggcgttgaatcttattcccggcgtggaaatttccacggtctgggaaaatcatgaaattcatattgtcgggctgaatattgatattactcatccgctaatgtgtgagttcctcgcgcagcagacagaacggcgcaatcagcgggcgcagctgattgccgaaagacttgaaaaagcgcaaatacctggggcgctggaaggcgcacaacgactggcgcagggcggcgcagtgacgcgcggtcattttgcgcgtttccttgttgagtgcggcaaagccagtagtatggcggatgtctttaaaaagtatctggcgcgcgggaaaaccggatacgttccgccacagtggtgtacaatagaacaagctattgatgtcattcatcattctggcggtaaggcggtgctagctcatcctgggcggtacaatcttagtgctaaatggctgaaaagattggttgcgcattttgccgaacaccacggtgacgcgatggaagtcgcgcagtgccagcaaagccccaatgaacgtacccagctggcggcccttgcgcgtcagcatcatttatgggcaagtcaaggatctgattttcatcagccatgcccgtggatcgaactgggtcgtaaactctggctgcccgcaggcgttgaaggcgtctggcagctatgggaacagccgcagaacaccacagagagggaattatgagccagtttttttatattcatcctgataacccacagcaacgtctgatcaaccaggcggtggagatcgtgcgtaaaggcggggtgattgtttatccaactgattccggctatgcgctcggctgtaaaattgaagataaaaacgcgatggagcgtatttgtcgtattcgccagctgccggacggtcacaactttaccctgatgtgtcgcgatctttctgaactcagcacctatagttttgttgataacgttgcgtttcgtttaatgaaaaacaacacgccgggcaactataccttcatcctgaaggggacgaaggaagtgccacgccgtctgttgcaggaaaaacgcaaaaccatcggtatgcgtgtgccttctaaccctatcgctcaggcgttacttgaagcattgggcgaaccgatgctttccactagcctaatgctgccaggcagcgaatttaccgaaagcgacccggaagaaattaaagatcgtctggaaaaacaggtagatttgattattcacggcggctatctcgggcagaaaccgacaacggttattgatcttaccgatgatacgccggtcgtggtgcgtgaaggcgtaggtgatgtgaagcctttcttataacaaattgcgttccacggatggaagactatggcagggaagtttcgctgcattttgctgttgatagcagggctgtttgtaagttctctaagttatgcagaaaacacggagatcccttcttatgaagaagggatcagcctctttgatgttgaagccactctgcaaccagatggggtgctcgacatcaaagaaaatattcattttcaggcgcgaaatcagcagattaagcacggcttttatcgtgatttaccacgactatggatgcagcctgatggggacgctgcactgctgaactatcatattgttggcgtcacccgtgatggtattcctgaaccctggcatcttgactggcatatcgggttaatgagtattgtcgtgggcgataaacaacgtttcttgcctcaaggcgactatcattatcaaattcattatcaggttaaaaatgctttcctgcgtgagggggattctgatctgctaatctggaacgtgaccggtaaccactggccgtttgaaatttataagacccgtttttctctccagttctctaatattgcgggtaatccatttagcgaaatcgatctttttaccggagaagagggcgacacatatcgtaatggccgcatccttgaggacggaagaattgaatcccgcgatccgttttatcgtgaagatttcacggtcctctaccgctggcctcacgctttacttagcaatgccagcgctccgcaaacgacgaatattttcagccatcttcttttaccctccacgagtagcttgttaatttggtttccgtgtctgttcctggtttgtggatggttatatctctggaagcgcaggccgcaatttacgccggtagatgtgattgaaaccgatgtcattccgccagattacacgcccggcatgttacgtctcgatgcgaagctagtttacgacgataaaggtttttgtgccgatatcgtaaatctgattgtgaaaggaaaaattcatctggaagatcagtctgacaagaaccagcaaatcctgattcgtgttaatgaaggcgcgaccagaaataatgcggtattactgcccgcagagcagttattactggaagcgttatttcgtaaaggcgataaggtcgttcttacggggagacgcaacagagtcttacgcagggcatttttacggatgcagaaattttatctgccgcgtaaaaagtctagcttttaccggtctgatacttttttgcaatggggtggactggcaatattggcggtcattctttacggtaacttgagtcctgtaggctgggcaggaatgagtctggtgggcgatatgtttattatgatctgctggattattccttttttattttgttcccttgagcttttgtttgcccgcgatgatgacaagccttgcgttaatcgtgtaatcatcactttgtttttaccactgatttgtagtggcgtggccttctattctctctacatcaatgtcggagatgtattcttttactggtatatgccagcgggttattttaccgctgtttgcctgaccggttatctcactggcatggggtatatttttctgccaaagtttacccaaactggacagcaacgttatgcccacggtgaagctatcgttaactatcttgcgcgtaaagaggcagcaacacacagtggacgtcggcggaaaggggaaacacggaaactggattacgcgttgctaggttgggctataagcgcaaatttggggagggaatgggcgttacgcattgcccctagcctttctagcgcgattcgcgctccagagattgcccgtaacggcgttttattcagtttacagacgcacctaagttgcggggccaataccagtttgttggggcgaagttattccggtggtggtgctggcggcggcgcgggtggcggaggcggtggtggctggtaattaagctgatgttaatcgaaacaagctttaaccataaagatagtgtagtatgttgcgcctcaaagccaggccgataaacgtcgagtcgtttacttaaggcctgaagagttcaaacagactttactatcagtgagtcagatgtaagttctgactcactgttgcacaaaagcatatcagacgcctgggaaggcgacaccaaaaggaagctctatgagcgaaaagctacagaaagtgctggcgcgtgccggccacggttctcgccgtgaaatcgaatctattattgaagccggtcgtgtgagtgttgatggcaaaattgctaaactcggcgatcgtgttgaagttacccctggattgaaaatccgtatcgatggtcacctgattagcgtacgtgagtccgctgaacaaatttgtcgcgttctggcctattacaaaccggaaggtgagttgtgtacccgtaacgatccggaaggacgtccaacggtgtttgaccgtctgccaaaactgcgtggcgcacgctggattgccgtgggtcgcttggacgttaatacctgtggtctgctgctgttcaccaccgatggtgaactggcaaaccgtttaatgcacccaagccgtgaagttgaacgtgaatatgccgtgcgtgtatttggtcaggttgacgacgcgaaactgcgtgatttgagtcgtggcgtgcagttggaagatggtccggcagcttttaaaaccatcaagttcagcggcggcgaagggatcaaccagtggtacaacgtgactctgaccgaaggccgtaaccgtgaagttcgtcgtctgtgggaagcggttggtgtgcaggtgagccgcctgatccgtgttcgttacggtgatatcccactgccaaaaggtctgccacgcggtggctggacggagctggacctcgcccagactaactatctgcgcgaactggtggagctaccgccagaaaccagctctaaagtcgctgtagaaaaagaccgtcgtcgcatgaaggcgaatcagattcgtcgtgcggtgaaacgtcacagtcaggtgagcggcggtcgtcgttctggcggacgtaataataacggttaatcaaagtatgccggacgtcatatccggcatttttacagattaataatcgatccctatctgcgcttttacaccggcatcaaacgcatgtttgacggggcgtaattcacttaccgtatctgccagttcaagaatatcccgatgacaaccacgacccgtgataatcaccgtctgttgatgtggacgttcatttaacgcctgcaccacttcttccagtggcaaatagtcatacgccaccatatacgtcagttcatcaagcaaaaccatatccagactggaatcagcaagcatccgctttgcatgttgccagacttcgcggcaggcggcggtatcagactcgcggttttgtgtatcccaggtaaagcccgttgccatcacctgaaactcaacgccatgtggctccagcagattgcgttcgccattaggccaggtgcctttaataaactgcacgacgcctactttttttccgtgaccaactgcgcgtgttgccgtaccaaatgccgcggtggttttgccttttccattgccggtaaagacgatgataataccgcgttcatcctgggcctgggccacacgagcatctactttttctttcactcgctgctgacgctgttggtagcgttcatcactcattgggaaattcctggtttacggcccggttgggcgtcaaaggtcatgccggttttacggcggctgtcatcgcccatcagccagaggtagagcggcatgatatcagcgggtgttttaagtttctgtggatcttcggtcgggaaggcgctggcacgcattgcggtgcgcgtaccgcctgggttaatgcagttgacacgcaggcgctgctgatattcatcggccagtacctgcatcatcccttcggtggcaaatttgctcgctgcatatgcaccccagttggctcgtccctgacgtccaacgctactactagtaaagaccagactaccggcgtcgcttttgagtaataaaggaagcagtgcctgggtgagcataaaggtggcattaacgttgacctgcatgacgtcctgccagacctgcggattttgttcgctcattgggcaaacatcgccgagcaatccggcattatgcaaaacaccatccagacgcggataattaacggcaatgcgctgtgccagttgttggcaattttcggacgtgcaggtcagcaaatcgagaataaaccactgtggctgacgcccagtttcttcgtttatgtggctggctacctgacgtaatttttcttcattacggcccaacagaatcactgtcgcaccatagcgtgcatacgtcatcgcggcttcacgaccaataccatcgctggctcccgtcaccaggataatgcgatcattgagtaaatcttgttttggctggtaatgcatggctactcctcaacgacgttgtctgtcgcgctgccagtgtactttatgactttggggctttatgcctgaaacagaagggcatttcaatcagcctggggcgataacaccgcaaaatggatactttgtcatactttcgctgcaataacatctctgcgagacggcttaacatgcctgttgtaaactgtgagccaaagcgttgtttaaccaaggtggggactcgtggaattgttgtctgaatatggtttgtttttggcgaaaatcgttaccgttgtgctagcgattgcggcgattgccgccattattgtcaatgttgctcaacgtaataaacgccagcgtggcgagttacgggtcaacaatctcagcgaacagtataaggagatgaaagaagaactggccgcggcgctgatggacagtcatcagcaaaaacagtggcacaaagcgcagaagaaaaagcataagcaagaagcgaaagcagcaaaagcgaaagccaaactgggcgaggtggcaactgacagtaaaccccgcgtctgggtgctggattttaaaggcagcatggacgcccatgaagtgaacagcctacgtgaagagataacggctgtactcgcagcattcaaaccgcaggatcaggttgtgctccgtctggaaagccctggtggcatggtgcatggttacgggctggcggctagccaactgcagcgtctgcgcgataaaaacattcctttaactgttacggtagacaaagtcgctgccagcggcggttacatgatggcctgtgtggcggacaaaattgtttccgcaccgtttgctattgtgggttccattggcgtggtggcgcaaatgcccaactttaaccgcttcctgaaaagcaaagatattgatatcgaactgcacactgccgggcagtataagcgcacgctgacgttgctgggtgaaaataccgaagaagggcgggagaaattccgcgaagagttgaacgaaacgcatcagttgtttaaagattttgtgaagcgtatgcgtccttctctggatattgaacaggtggcaacgggtgaacactggtacggacaacaggcggtagagaaaggcctggttgatgaaatcaacaccagtgatgaagttattcttagcctgatggaaggccgtgaagtggtcaatgtacgctatatgcagcgtaaacgactcattgaccgattcaccggcagcgcggcagagagcgccgatcgattgttgctacgctggtggcagcggggtcaaaagccattgatgtaaaagacaaacgcgaggctaagacctcgcgttttgctttaatcaaccagatgatatttttcactaagcacatgggccaggtgtttgaacatattaaacaccgcggtgcttttggctgttggcaatccttgttcatctaaaaagtagtcgccggtaaataccagcacgccattacgctgcgtgacgccggtggcttcaatccctgcgagcgtatcctcatgctcacgaatgattttgttggcctctttcaacagcgtttcgcggtcgatgggttgtgtctctttgttcattatttactccttaaacaaggacattagtctacgccaggcatggcttgcagacaaatataccacgctggtggcaagagcgccttactggcaactttggattttgcatgctaataaagttgcgtatcggattttatcaggtacagtgtgacgctttcgtcaatctggcaatagatttgcttgacattcgaccaaaattccgtcgtgctatagcgcctgtaggccaagacctgttaactcagtcacctgaattttcgtgaacagagtcacgacaaggggttgatatccgcagagagcgagtccatatcggtaactcgttgccagtggaaggtttatcaacgtgcgacgcattcctggaagaatcaaattaggtaaggtgaatatgggtaaagctcttgtcatcgttgagtccccggcaaaagccaaaacgatcaacaagtatctgggtagtgactacgtggtgaaatccagcgtcggtcacatccgcgatttgccgaccagtggcagtgctgccaaaaagagtgccgactctacctccaccaagacggctaaaaagcctaaaaaggatgaacgtggcgctctcgtcaaccgtatgggggttgacccgtggcacaattgggaggcgcactatgaagtgttgcctggtaaagagaaggtcgtctctgaactgaaacaactggctgaaaaagccgaccacatctatctcgcaaccgaccttgaccgcgaaggggaagccattgcatggcacctgcgggaagtgattgggggtgatgatgcgcgctatagccgagtggtgtttaacgaaattactaaaaacgcgatccgccaggcatttaacaaaccgggtgagctgaatattgatcgtgttaatgcccagcaggcgcgtcgctttatggaccgcgtggtggggtatatggttagcccgctgctatggaaaaagatcgctcgtggcctgtctgccggtcgtgtgcagagcgtggcggttcgcctggtggtcgagcgtgagcgtgaaattaaagcgttcgtgccggaagagttctgggaagtcgatgccagcacgaccacgccatctggtgaagcgttggcgttacaggtgactcatcagaacgacaaaccgttccgtccggtcaacaaagaacaaactcaggctgcggtaagtctgctggaaaaagcgcgctacagcgtgctggaacgtgaagacaaaccgacaaccagtaaacctggcgctccttttattacctctacgctgcaacaagctgccagcacccgtcttggatttggcgtgaaaaaaaccatgatgatggcgcagcgtttgtatgaagcaggctatatcacttacatgcgtaccgactccactaacctgagtcaggacgcggtaaatatggttcgcggttatatcagcgataattttggtaagaaatatctgccggaaagtccgaatcagtacgccagcaaagaaaacagtcaggaagcgcacgaagcgattcgtccttctgacgtcaatgtgatggcggaaagcctgaaggatatggaagcagatgcgcagaaactgtaccagttaatctggcgtcagttcgttgcctgccagatgaccccagcgaaatatgactccacgacgctgaccgttggtgcgggcgatttccgcctgaaagcacgcggtcgtattttgcgttttgatggctggacaaaagtgatgcctgcgttgcgtaaaggcgatgaagatcgcatcttaccagcagttaataaaggcgatgctctgacgctcgttgaacttacaccagcccagcactttaccaagccgccagcccgtttcagtgaagcaagcctggttaaagagctggaaaaacgcggtatcggtcgtccgtctacctatgcgagcatcattagcaccattcaggatcgtggctacgtgcgagtagaaaatcgtcgtttctatgcggaaaaaatgggcgaaatcgtcaccgatcgccttgaagaaaatttccgcgagttaatgaactacgactttaccgcgcagatggaaaacagcctcgaccaggtggcaaatcacgaagcagagtggaaagctgtactggatcacttcttcagcgatttcacccagcagttagataaagctgaaaaagatccggaagagggtggtatgcgcccgaaccagatggttctgaccagcattgactgcccgacttgtggtcgcaaaatggggattcgcacagcgagcaccggggtattccttggctgttctggctatgcgctgccgccgaaagagcgttgcaaaaccaccattaacctggtgccggaaaacgaagtgctgaacgtgctggaaggcgaagatgctgaaaccaacgcgctgcgcgcaaaacgtcgttgcccgaaatgcggcacggcgatggacagctatctcatcgatccgaaacgtaagttgcatgtctgtggtaataacccaacctgcgacggttacgagatcgaagagggcgaattccgcattaaaggttatgacggcccgatcgttgagtgtgaaaaatgtggctctgaaatgcacctgaaaatggggcgtttcggtaaatacatggcctgcaccaacgaagagtgtaaaaacacacgtaagattttacgtaacggcgaagtggcaccaccgaaagaagatccggtgccattacctgagctgccgtgcgaaaaaagtgatgcttatttcgtgctgcgtgacggtgctgccggtgtgttcctggctgccaacactttcccgaaaagccgtgaaacgcgtgcgccactggtggaagagctttatcgcttccgcgaccgtctgccggaaaaactgcgttatctggccgatgcgccacagcaggatccggaaggtaataagaccatggttcgctttagccgtaaaaccaaacagcaatatgtctctagcgaaaaagacggaaaggcgactggctggagtgcattttatgttgatggcaaatgggttgaaggaaaaaaataacctttaattctgtcaggtttttataaacaaagggtcgcgaaagcggcccttttttattgcatattattttttcttcacacctatacactaaggctataaatgatatagtggttatagttagcaccttttttattattaaatcgtattagtcacccgccaggtgtgacgaaaaaacgatgttctgatggcgtctaagtggatggtttaacatgaaattacaacaacttcgctatattgttgaggtggtcaatcataacctgaatgtcagtagtacagcggaaggactttacacaagtcaacccgggatcagtaaacaagtcagaatgctggaagacgagctaggcattcaaattttttcccgaagcggcaagcacctgacgcaggtaacgccagcagggcaagaaataattcgtatcgctcgcgaagtcctgagcaaagtcgatgccataaaaagcgttgccggagagcacacctggccggataaaggtagtctgtatatcgccaccacgcatacccaggcacgctacgcattaccaaacgtcatcaaaggctttattgagcgttatcctcgcgtttctttgcatatgcaccagggcagcccgacacaaattgctgatgccgtctctaaaggcaatgctgatttcgctatcgccacagaagcgctgcatctgtatgaagatttagtgatgttaccgtgctaccactggaatcgggctattgtagtcactccggatcacccgctggcaggcaaaaaagccattaccattgaagaactggcgcaatatccgttggtgacatataccttcggctttaccggacgtagtgaactggatactgcctttaatcgcgcagggttaacgccgcgtatcgttttcacggcaacggatgctgacgtcattaaaacttacgtccggttagggctgggggtaggggtcattgccagcatggcggtggatccggtcgccgatcccgaccttgtgcgtgttgatgctcacgatatcttcagccacagtacaaccaaaattggttttcgccgtagtactttcttgcgcagttatatgtatgatttcattcagcgttttgcaccgcatttaacgcgtgatgtcgttgatgcggctgtcgcattgcgctctaatgaagaaattgaggtcatgtttaaagatataaaactgccggaaaaataatttcttgcgttattttcggcaccttttatgtagcgaaggtgccggaatatattctcttttgttacttatttctataccgtgcacaatatttttatccctcatatttatagggtaaattacctgtaaagtagtgtctaattacccgcctcgcaaactccagttttcaaatatctatttcaggtcaaaagattgaattattcactggagacgattcgtaaattcgctggatttttgactaaagtttctttaggatttgtctcatcgtatgattaattacaccaatcgttcaacgtcttgctgataagtgatggcgattatatgaggttagcaatgccttctggaaatcaggaaccccgccgcgatcctgaattaaaacgtaaagcctggctggcggtttttcttggttctgcacttttctgggtggttgtcgcactgctgatttggaaagtgtggggataactatggtcggtcaggagcaactggagtcgtcaccattatgccagcatagtgacaatgaaacagaaacgaaacgggaatgttccgtcgttattccagacgactggcaactaacatcgcagcagcaagcctttatagaactgtttgctgaagatgatcagccgaaacaataattatcatcattcttattacccatttttaatgaattaaagggcttttaatacaccgcagcaataacagcttgagttatctcaacacaaaataataaccgttaagggtgtagcctatgatcaacacaaatatgaaatattggtcctggatgggcgcgttttctctgtcgatgctcttctgggccgaactcctctggatcattactcactgatccttgaccccgctgcggcggggttgtcatttgctttgccacaaggtttctcctcttttatcaatttgggttgttatcaaatcgttacgcgatgtttgtgttatctttaatattcaccctgaagagaatcagggcttcgcaaccctgtcattaaggaggagctatgagcagtaccctacgagaagccagtaaggacacgttgcaggccaaagataaaacttaccactactacagcctgccgcttgctgctaaaagtctgggcgatatcacccgtctacccaagagtctcaaagttttgctcgaaaacctgctgcgctggcaggatggtaacagcgttaccgaagaggatatccacgcgctggcaggatggctgaaaaatgcccatgctgaccgtgaaattgcctaccgcccggcaagggtgctgatgcaggactttaccggcgtacctgccgttgttgatctggcggcaatgcgcgaagcggttaaacgcctcggcggcgatactgcaaaggttaacccgctcagtccggtcgacctggtcattgaccacagcgtgaccgtcgatcgttttggtgatgatgaggcatttgaagaaaacgtacgcctggaaatggagcgcaaccacgaacgttatgtgttcctgaaatggggaaagcaagcgttcagtcggtttagcgtcgtgccgccaggcacaggcatttgccatcaggttaacctcgaatatctcggcaaagcagtgtggagtgaattgcaggacggtgaatggattgcttatccggatacactcgttggtactgacagccacaccaccatgatcaacggccttggcgtgctggggtggggcgttggtgggatcgaagcagaagccgcaatgttaggccagccggtttccatgcttatcccggatgtagtgggcttcaaacttaccggaaaattacgtgaaggtattaccgccacagacctggttctcactgttacccaaatgctgcgcaaacatggcgtggtggggaaattcgtcgaattttatggtgatggtctggatagtctaccgttggcggatcgcgccaccattgccaatatgagcccagaatatggtgccacctgtggcttcttcccaatcgatgctgtaaccctcgattacatgcgtttaagcgggcgcagcgaagatcaggtcgagttggtcgaaaaatatgccaaagcgcagggcatgtggcgtaacccgggcgatgaaccaatttttaccagtacgttagaactggatatgaatgacgttgaagcgagcctggcagggcctaaacgcccacaggatcgcgttgcactgcccgatgtaccaaaagcatttgccgccagtaacgaactggaagtgaatgccacgcataaagatcgccagccggtcgattatgttatgaacggacatcagtatcagttacctgatggcgctgtggtcattgctgcgataaccagctgcaccaacacctctaacccaagtgtgctgatggccgcaggcttgctggcgaaaaaagccgtaactctgggcctcaagcggcaaccatgggtcaaagcgagcctggcaccgggtagcaaagtcgtttctgattatctggcaaaagcgaaactgacaccgtatctcgacgaactggggtttaaccttgtgggatacggttgtaccacctgtattggtaactctgggccgctgcccgatcctatcgaaacggcaatcaaaaaaagcgatttaaccgtcggtgcggtgctgtccggcaaccgtaactttgaaggccgtatccatccgctggttaaaactaactggctggccagcccgccgctggtggttgcctatgcgctggcgggaaatatgaatatcaacctggcttctgagcctatcggccatgatcgcaaaggcgatccggtttatctgaaagatatctggccaagcgcacaagaaattgcccgtgcggtagaacaagtctccacagaaatgttccgcaaagagtacgcagaagtttttgaaggcacagcagagtggaagggaattaacgtcacacgatccgatacctacggttggcaggaggacagtacctatattcgcttaagccctttctttgatgaaatgcaggcaacaccagcaccagtggaagatattcacggtgcgcggatcctcgcaatgctgggggatagtgtcaccactgaccatatctctccggcgggcagtattaagcccgacagcccagcgggtcgatatctacaaggtcggggtgttgagcgaaaagactttaactcctacggtagccggcgtggtaaccatgaagtgatgatgcgcggcaccttcgccaatattcgcatccgtaatgaaatggtgcctggcgttgaaggggggatgacgcggcatttacctgacagcgacgtagtctctatttatgatgctgcgatgcgctataagcaggagcaaacgccgctggcggtgattgccgggaaagagtatggaagtggctccagtcgtgactgggcggcaaaaggtccgcgtctgcttggtattcgtgtggtgattgccgaaagctttgaacgaattcaccgtagcaatttaattggcatgggcatcctgccgctggaatttccgcaaggcgtaacgcgtaaaacgttagggctaaccggggaagagaagattgatattggcgatctgcaaaacctacaacccggcgcgacggttccggtgacgcttacgcgcgcggatggtagccaggaagtcgtaccctgccgttgtcgtatcgacaccgcgacggagttgacctactaccagaacgacggcattttgcattatgtcattcgtaatatgttgaagtaacaactatttgcttgccggttattttgcttccggcaagcaaatgaattacacaatgcaagagggttatttgttcagcaaatggcccattttctcggctttggtatcgagataatgttcgttattggggttacgacctacaatcaatggtacgcgttcaacaatattaatccctgcttcggtcagaatttcgacttttttcgggttattggttaacaagcggacttcattgacgccaaggagtttgaacatatcagcgcaaagagtgaagtcgcgctcatcagcggcgaagcctaactggtggttagcctctacggtatcgtaaccttgatcctgcagtgcgtaagcgcggattttattcagcagaccaatgttacgaccttcctgacggtgatacagcaaaataccacggccttcctcggcaatttgcgtcaatgccgcttcgagctggaagccacaatcgcagcgcaagctgaacagggcgtcaccggtcagacattcggaatggacgcgcgcaagtaccggggtatgcccggaaatatcgccatagactagcgcgacatgatcgtgtccggttgccagttcttcaaatcccaccatcaggaaatcgccccatggggttggcagtttggcttctgccacacgtttaagctgcatgaaattctccagataatgctggttctgtattggcttattttgccataacgagaaggggttcacctaatcacgacgcgtcgatcgttcacggaatggcacaaatctgtcaatttttcctggaactggcgttttcagttatgattgtgggacttatcaaaaaggagaggccatgcgtagcattgccagacgtaccgcagtgggagctgcactattgcttgtcatgccagtagccgtatggatttctggctggcgttggcaacctggagaacaaagttggctactaaaagcggctttttgggttactgaaactgtcacccagccctggggcgtcattacacatttgattttattcggctggtttctctggtgtctgcgttttcgcattaaggctgcctttgtattatttgccattctggcggccgcaatccttgtgggacaaggcgttaaatcctggatcaaagacaaagtccaggaaccacgaccttttgttatctggctggaaaaaacacatcatattccggttgatgagttctacactttaaagcgagcagaacgcggaaatctagtgaaagaacagttggctgaagagaaaaatatcccacaatatttgcgtagtcactggcagaaagagacggggtttgcctttccttccggtcacacgatgtttgctgccagttgggcactgctggccgttggtttgctgtggccgcgtcggcgaacgttaaccattgctatcttgctggtctgggcaacgggagtcatgggaagccgcctgctgctcgggatgcattggccacgcgatctggtagtagctacgttgattagctgggcgctggtggcggtggcaacgtggcttgcgcaacgaatttgtgggccattaacaccacctgcggaagaaaatcgcgaaatagcgcaacgagaacaagaaagttaacgctggttgattttccgaatttagcccttaaatcatcaacaatgcgtgtggatgccatttcgcagacggcgcgaaaatggtactttaaagggctattgcggtaagttgaccataatttattcgctctaaccacataacgggaagtaatgtgaaatatttactcattttcttactggtgttagcgatcttcgtgattagcgtcacgttgggtgcgcagaacgatcaacaggtgacgtttaattatctgttagcgcaaggggagtaccgtatttccacattgctggcggtattgtttgctgcggggtttgctatcggttggttgatttgtggcctgttctggctgcgagttcgtgtttccctggcgcgcgctgaacgtaaaataaagcgactggaaaaccagcttagtcccgcgactgacgtggctgtagtgccgcacagcagtgcggcgaaggaataactttctatgctggagttgttgtttctgcttttgcctgtagccgctgcctatggctggtatatgggccgcagaagtgcgcaacaaaacaagcaagatgaagccaaccgcttgagccgtgattacgtagcgggggttaacttcctgcttagtaatcaacaggataaagcggtagacctgtttctcgatatgcttaaagaggatacaggcaccgttgaagcccaccttacgctcggaaacctgttccgtagccgtggcgaagttgatcgcgctattcgcatccatcagaccctaatggaaagcgccagcctgacctatgaacagcgtctgttggcgattcaacaactggggcgtgattacatggccgccgggttatatgaccgcgcggaagacatgttcaatcagctgaccgatgaaactgacttccgcattggcgcgctgcaacagttgctacaaatctaccaggctaccagtgagtggcagaaagcaattgatgttgccgaacgcctggtgaagctgggtaaagataaacagcgcgtcgaaattgcccatttctactgtgagttagccctgcagcatatggccagcgacgatctcgatcgtgccatgaccttgctaaaaaaaggggcggcggcagataaaaacagcgcccgcgtatccataatgatgggacgcgtgtttatggcgaaaggagaatacgccaaagccgtcgaaagtctgcaacgcgtgatatcccaggacagagaactggtcagcgaaacgctggaaatgttgcaaacctgctatcagcagttgggtaaaactgccgaatgggcagaattcctgcagcgtgcggtggaagagaacaccggtgccgatgctgaattgatgcttgctgatatcatcgaagcgcgcgacggtagtgaggccgcacaggtctatattacgcgccagcttcagcgtcatccgaccatgcgtgtgttccataagttaatggattaccacttaaatgaagcggaagaagggcgtgccaaagagagcctgatggtgctgcgtgacatggttggcgagaaggtacgtagtaagcctcgttatcgttgccagaaatgtggttttaccgcatacaccctctactggcattgtccgtcttgtcgggcctggagtaccattaaaccgattcgcggtcttgatggcctgtaatttttaaaaaaaatccgactttagttacaacatactaattattaatgttccattgtgctccggcaacgacggcgcagaaaaagcctgccaggggagaaatcgcaactgttaattttttatttccacgggtagaatgctcgccgtttacctgtttcgcgccacttccggtgcccatcatcaagaaggtctggtcatgacgttaactgctagttcttcttcccgcgctgttacgaattctcctgtggttgttgcccttgattatcataatcgtgatgacgcgctggcctttgtcgacaagatcgacccacgcgattgtcgtctgaaggtcggcaaagagatgtttacattgtttgggccacagtttgtgcgcgaacttcaacagcgtggttttgatatctttcttgacctgaaattccacgatatccccaacactgcagcgcacgctgtcgctgctgcagctgacttaggcgtgtggatggtgaatgttcatgcctctggtggggcgcgtatgatgaccgcagcgcgtgaggcactggttccgtttggcaaagatgcaccgcttttgattgctgtgacagtgttgaccagcatggaagccagcgacctggtcgatcttggcatgacactgagtcctgcagattatgcagaacgtctggcggcactgacgcaaaaatgtggccttgatggtgtggtgtgttctgctcaggaagctgtgcgctttaaacaggtattcggtcaggagttcaaactggttacgccgggcattcgtccgcaggggagtgaagctggtgaccagcgccgcattatgacgccagaacaggcgttgagcgctggtgttgattatatggtgattggtcgcccggtaacgcaaagcgtagatccagcgcagacgctgaaagcgatcaacgcctctttacagcggagtgcatgatgagtgattccaacagccgtctggtctacagtacggaaaccggacgtattgatgagcccaaagcggcccctgtacgccctaaaggcgacggtgtggtgcgtattcagcgtcagaccagtggacgtaaaggtaagggcgtttgcctgattaccggtgtcgatctcgatgatgccgaactgacaaaacttgcagcggaactgaagaaaaaatgcggctgcggcggagcagttaaagatggagttattgaaatccagggcgataagcgtgatttattaaaaagtctacttgaagcgaaagggatgaaggtaaaactcgcaggcggttaacataaaaagccacggatatatccgtggctttcgaatattttactgtgcgtattattcagttatttcgtactgaacagaatcaagcgtattataattgcgagtcgataatcgacatttatttacgattatttaccgacctggtgaccaataacacctccgacagctgcaccacctaatgtacccaacgtactgccatcggtcagtactgcaccgcctaatgcccctgcacccgcgccgattgcggtgttgcggtcccgtttagaccagttagaacaggcactcagagacattgccaaagtaattgccagaacagccgcggtcatttttttgctcgttacaaacataatactctctcctgaatttatgattcacggaagtaagctctctataactataatagctaagaataagtctggtgaaattattccgtgaaatctgctcgcgcgcagggttatatcacgcaggtgataatgacttcctgttatatcgctgataataattttatatcttgagagtgttaataacaggtaaatagtcttaattatcaaccaggaatcatcttagagcggatgatttgccaaactgcaaatcatccgtagagaagggaaatggttaaatgtcaacgacgtgaatggtgagtttactgtgctcaagatgcatcagatcgctggcgcgtattttgctatcggtaatcacgcgattgaatcgctcaacgggaccgatggagtaactatgtacagcaccaaatttgctgctgtcagtcaggactatcgcttcgcactctttttccagcacggcattgaccacatcggtacgcatcatatcgcgaccggtaaatccagtttcaggttgccagccatcaataccaataaatgctttgctgaaatgcacctgttggatgcactggcgtgtcaaagggccaaccatactttcgctttttttctgatacacgccaccgagcaaaataacttcacaaggcgcgtctttcagcaaatgcgcgatgtagctgctgaccgtgatgatagtgacatttttcttctgctcgcccagagtccgggcgagtagggcattgctgctgccattttcgataaagatggtttcgcccggttgaaccaggctcgcggcaaactcggcgagttcacgcttcagcgtatagttgctcatcatacgggtttcgacgtcatcactatcaaggctaacagcaaagccatgtgcacggcggaggtaactcagtttttcgagtgtgttgagatcctggcgaatggtaacttcagaaactccagtggcttttgccagatcggttacgctaacctgaccctggtcaatgaccatctgtagaatagtttgttgtcgggaattcatcgctgtaattcttataacgttataatacttaataaaaaaatactgacgcgccgggcatcctcaaataggaaaacctgaaggcacgattgttaaatctcccacggtgccttcgggatgtctggcgtagattcagcaacctggcgcaagagttctgctttaagtatctcgagattatggatcgcagagtggtaatcgcctgccacaaggatatctaacacaatatcaatacgttcggcaacgcgctgggcatcaaattcagacatcaaggacatccttatagcaaaagggggaaaatgaataatgcaaaaattgccgctaaaagagaagtgtttaacagcaacggctaattatcatccaggaatacgatatataatgacgggatatagcgctaagtatatatattcatctacttatgcgcgcttcagatagcgtttataccagcgttcgaaggcgacggcgggcatcggtttggcaaacaaaaatccttgccgctcattgatcccgttcttggttaaaaaagcatcttcctttgcactctctacaccttcggcgatcacctgaagattcaatgcctgggccacagcgacgatcgcccggaccagactctggctgacaggttgtttgtgaatatctcgaacaaaaacctggtcaagtttgatggcatcgatcggaaagcgcgccagttggctaagactagagtagccggtaccaaaatcatccagatgcacttgcgcacctagttggctaaattgttgaataacagacagtgccagttcatcattctcaatcagacaactctctgtcagttcaacatctatagggcagtattcaaaattgagttcctggagaacctgtttcagggcggtgaaaatggtttgatcggcgagctgacgtgcagaaatatttaccgccactcgcaggtttatgcctttatcccgccactttgccacctggcgtacgacatcgagaatcacccaacggcctaaaggcacaattagcccactctcttcggcgtaggaaatgaagtccaacggtggaatcaacccacgttcaggactctgccaacgtactagtgcttccagactgcgcacttcgccacgccaggtgattttcggttgatagtgaataaccaactgatcgttttccagtgctttacgcaagttggtatccagccagagatattcaaatacccgttgattcatttctggggtaaaaacgcaaaattgtcctcgtccgccttccttcgctgtgtacattgctgtgtcggcgtgacgaataatagccgtgctgtcactaccatgttcgggagagagtgcaatacctacactacagctggtataaacttcaattaaaccaatgcgaaaggggagccgtaagcgggtcaaaattcgacttgccattgcttccagcgcgctttgactggtgttggatgccagtaccagaaactcatccccacctggacgcgccaacacctggtcatgttcgagacagcttaaaatagccaaactcacgtcgcgtaataactggtcaccaaacaaatgcccataggcgtcgttgacctttttgaaattatccaaatcaagatacacaaccccaactttattgttatctgcatgattaatagcgtgatcgattaaatcctgcattgcgttacgattcggcagtccggtgatactgtcggtatttgccagaatacgcagtcgctcctgagcgcggcgctcttcggtaatgtcggtgccggaacagattaaaaaaatctcgtttttgccactgccgctgtggacaaatttattgcgaaacagaaacagccgctggcctttacatgttggtatccacagttcgacttcatatgcattgccgcttcgaaaaaatacacggttattgcgcctggatgccgcagcttcacgacggctcataaacagtttaaacacgctttgcccaatgacgtcgtgttctttcaaccctgtgtaatcttcacataaccgattgaagcgttggatattcccccggctgtcgagaatcactattgcggaatgtgcttcagaaactacctgctcagcaaaggaaagcccgtgacttaaatcacgagcaaccgccggtgtgtcatgccatgcagacgcgttgccagcccattcccgtttattgatttttcgtcctaccagatgcacagaaagatcgctttcatcgacggtcagactcatcatcaggctggaggtgatgaccgtcatttccctgatgcgagcagcctgttcggcagataactgcaatgtacgatcaggttctgtggtttcggtggtagaaaagcgcaaaacatcgctgctttccgtcaaccgccagtatggattgtggcttccgagaaagttgtacaacgttgtggactccctaacggttttcatgatgcatatcctccggttaacagcggagtccgcggttaaataaaaggaacaacatgacttacatgaaattaacggcggctaaacgcattgttttttttatatatttatttgtaatccagttttggaaaaacgccagttttcaaacgaaagtcagttaaaaaatctgcctggatataacgaaggtagagcggggaaataaacggcccatccatgaggaatgggccgtgaaaggagattacgcgaccgggcgcgcaataatgctgcgggtttccatgcggacttcggcaatagtgacgtcaataacgtcagtcactttgtaaaccgtttcacctttaatttgtacagtgccgttttcctggctgcaaaccagttcatcgcgcacagcgtgtaagaaaggtgccggaataaaggcgatagcgccgttatcaaccaaacgaacacgcatgccgccacggctgatatcgacaatttccgctgcgaaacgggtgtcggtcccggctttgtctttcaggaagcgtgcgtataaccagtcaccaacatcacgttctgccatccggttgagacggcgacgctcggccatttggacagtgatttcatcctgtgggcgcgtcgcagtttcgcctttgataaccgctttcagcagacggtggttgatcatgtcgccatatttacggatcgggctagtccaggtggcgtatgcttccagaccgaggccaaagtgaggaccgggttcagtgctaatttcagcaaaactctggaagcgacgaatgcggctgtcgaggaaaccagttggttgcgcgtccagttcacgacgcagtttgcagaaaccgtccagcgtgagcacttcttcggcatcgacatgcagaccgtgcgttttcagcaacgctgccagcgcgtcggcattcgccggatcaaagcccatatgcacgttatagatgccaaaaccgagcttatcgcgcagtacgcgggccgcacaaatgttagcggcaatcatcgcttcttcgacgatacggttggcaatgcgacgaggctcggcgacgatatccagcacttcacctttttcaccgagaataaagcggtaatccgggcgatctttaaacaccagtgcgtggttatgacgccactcgccgcggcgttggcaaatttgcgctagcaaacggacttgttcggcaattgcttcactttcaggctgccagtcaccggtattttccagccagtcagaaacctggtcatacaccagctttgctttggattcgatggtggcggcaaagaattcgatattatcttcaatggtgccatcagcggagagcgtcatgcggcatgccagtaccgggcggacttcattggcgcgcagactgcagagatcgtcagaaagctcgcgaggcagcatagggatgttgaagccaggcagatagttggtgaatgcgcgaattttcgcggctttgtccagcttgctgccttcagcaatccacgcggttggatcggcaatcgccacaatcagctgaagtttgtcatccggcaacgccttagcgaaaagggcgtcatccatatcttctgtgctggcactgtcgatggtgacaaaatccagcgcggtcagatcttcacgaaccagaccttcatcgagcatttcggtagcgacgccgtctggtgcttctttttccagattatggcgtgcaagggtaacccaccacggtacaaagtgatcgtcaccaaaagtgatgtattgtgtcagttctgcatagaaagaacgatcgcctttcagcggatgacggcgcatttcggcaaccgcccagtcgccttctttaaactcgtggttcaggccacgggctgcgcggcaaggaatggcgtcttttaagagtggatgatcaggaacgatggccagacggtcatttttgccctgaaccttacccacgaaacgagtcaggaacggttcaaccagttcttctggctctgcggattcacgttctttttcactgtggatcaccgcgataattcggtcgccatgcatgacttttttcatctgcggcggcggaatgaaataacttttttgcgcgtcgacttccaggaagccaaagcctttttctgtggcttttaccaccccttcagcgcgtggcgtctgggaatgcagttgctgtttaagctgcgctagcagcgggttgtcctgaaacataattgtctattttggtggccattagagcggctgacagttttacgcgaatctgtctgacgcggcaaggttaatatgtctcacccaacgcgatttttaagcgatttatccagccacacagcccgctccataccagcagattaataatctgcgtactacttttttcgtgttcgagtaaagggctgaactgggcggcgctaaagcgatcgggtgctcgggtcagccattgtatcgcctgaacggtagcgcgctcaacagaatgacggtcagcccattggttaatttcattttcgcccttgcgcataagggtgctgatttttttatattcattactactatccatacaggtggcaaaacaagcaggactgccatttatacgcgcgcataacaacgccgcaagctgattatccggctgtgtattgccccgtgtgctgtttaacaacttttcgagaagggaaagactaatagggtggagagagagtatttcggccagttggcaaagttctgcagtactactttttgtgtgctcttcaggtagtttttccacctcatagctgcttcgccagcgtaaactttcatcagcaaacagactcgcgtcggcgtagttttgtatctccagcccgggtaaccagcgtaccggatgcccgagataagcctgaaatgtcgcaattgtccgcgcctgaaagccaataaaaccaatgatttggctaatgatcacacagtcccaggcagtaagaccgacgtcattcagatgctggcggcttcggttgtcgataatagaagggctgctagccagttggcgggcatattgcgtgatttgtgccaaccgatgattactttccctggtggaatcaggcccggggagcggcgtaagtcgcgcgctatagtagttacataaccgctggacgccgcaaacctgagcaaccgtcagggccgtgctcaagcgttcataagcggtgaaggtctgactacgggtcacggtaagctggtcagggaacaaatccactgcaagaacacgcgcagggtccagccaactaaggaagggggccagcgtttctttttcaaggatcacgtcgagtagaaagggatcgctgacctttgcggcttccgggaccagaggcagaacgtcatactccgtagtactggattgcgtttcatgataccagtggcttttgccggtgatgtggcgttgttccatgggcgctccttggtcgtaaaggaaatcgttatcctgacgcaaggcgggaaggggagaaagacggatcggcgataacaaatatcagaaaggtataacagagataacgggcggcagaacgccgcccatctttaccaacagaacgattatttcagttcgagttcgttcattgcagcaatgctgaaaccgccgtcaacgtggaccacttcaccggagataccggcagagagatcggagcacaggaatgccgcagagttacccacatcttcaatagtaacggtacggcgaatcggggtaacggcttcgcaatgagccagcattttgcggaagtctttgataccggaggccgccagagtacggatcggaccagcagagatggcgttaacacgcacaccttccggacccatcgcgttcgccatatagcgcacgttcgcttccagagacgcttttgccagacccataacgttgtagttcgggatagcgcgctcagcgccaaggtaggaaagggtcagcagggcagaacccggattcagcatggagcggcaagcttttgccattgcaacgaagctgtaggagctgatgtcgtgggcaattttgaagccttcacgggtaacggcgttaacatagtcaccatccagctgatcgccaggtgcaaaaccaatagagtgtacgaaaccgtcaaatttcggccaaactttccccagttcagcgaacatggtgtcgatgctggcatcttctgcaacatcgcactgcagaacgatgtcagaacccaattgagcggcaaattcttctacgcggcctttcagtttgtcgttctggtaggtgaatgccagttcagctccttcgcggtgcatcgcctgagcgataccgtaggcgatggatagtttgctggcaacaccggttaccagaatgcgcttaccggaaagaaaacccatagctttaatccttattgttgatgcttgttgtgcctgaaaatcaggcgattcgtcgttttagtaaacagtacgaacagataaacggttattataatcaacctggctgtgagtagctatagttgccaggtccgaccggagcaggctgcggcagggggggcgcttttcccctcaccctaaccctctccccagaggggcgaggggaccgtattgtgcaaatattgttaccccagcaacaaacaggctcatacagcccctaaccctttcatggcgatggctgggacggttcagaccttgccgaatattctccagcaccgtctccatgttttcaccacaacagctattcggctcggtctgccccctcgctctttcagggagagggactccggcggttcagttcctgcagaatattctccagcaccgtctcctcattacaatcaatctcgttattccagaaacgcagcacggtccagccctggctctcaagccagctagtgcgcctggaatcataggcaactgctaaatcatgctgcccaccatccagctcaacgactacacgcgcgctgcagcaagcaaaatcgagaatgtagctccccactggatgttgacggcgaaatttgaaatcactaaaacgtcggctgcgaagatatcgccagagctttcgttcctgcaaagtgagattgcgtcttaaatcacgcgcattacttttaattttatctatcacctcattctgacaagatttaatcttttgtcagaatgaggtgaataatctggaaggaggattcagaaaattagcgatctttacgccacgcatccgccgtcaatgcctcgccaaaatgaccggcaatcagccgtttggtgagttcatgcagcgggcttgccagcacatccgcggtgctgcctcgctcgacaacctcgccctgatgcatcaccagcacctggtcgctaatgtgcttcatcattccgatatgctgggtaacataaatatagctaatgccctgtttttcctgtaattccagcatcagattaatcaactggctacgcatgctcatatccagactagcgagggcttcatcggcaataatgacttttgggcgcaatatcagcgcgcgcgccagacccagacgctgtttttgtccgggtgccaacatatgcggatagtaactgacgtgatccggtagcagcccaaccatacgcatcgtttcaataatctgtttgcgacgctgttccggttccaggtcggtgttcaggcgcagtggaaaatccagaatttggctgatacgttgacggggattcaagctggtgctaggatcctgaaaaatcatgcgaatacgctgactgcggaaggaataatcgccaaaatgcagtggatgatcgtcaatcaataactcgccgctggtaggctctatcattcccgccagcatttttgccagcgtggatttaccgctaccattctcgccaataatcgccagtgtctggccttcacgtagcgtaaagctcaagggttttaccgcttctacggtctgacgacgaaaccagccggtccggtagcggaacgttttacttaaattacgcacttcaagcagcgtttcgatcatctcactctttctccatgttcagcgggaaatgacaggcatagagatgatttttcgcccccgtcaaacgtggcgtcacaatgcattctcgttgtgcatacgggcaacgtggccccagacgacaaccaatcggtaactgttccagcagtgggatagcgccgggcagcgtattgaggcgacttttatgcggcatcgcgctgccgaagtctggtatcgcgcggatcagcgcctgggtataaggatgatgtggcatcgtcaccaactccttactcggcgcggtttccactgtttgaccgcagtaaagcacgttaattttatccgcccattggctaagcatttgtaagtcatggctgataagcaaaatagtggtattgctgttttggttgagacgcgtcagcaggcgaaagatttgcgcctgggttgttggctccatactgttggtcggttcgtcagcaatcagcagacgcggttgattcgccagtgcaatggctatcatcactttctgacattcaccttcggtcaactcatagggaaaactgcgcatcgcatctttgtgatctttaatccccacgcggtgcagcagttcaatggcacggcgtttgcgccagccaaaacgctgccaccaacggcctttataggtccaggctgggatgttttgcatcaactggcggcccacacgttcactagggtcaagacagctctgcggttcctggaaaatcatgctcacgttatggccaaccagtttgcgccgttcgcgtgcggagagacgcagcaaatcgatatcatcaaaacgcatacggtcagcagtaacacgccagttatctttattcaccccacaaatcgctttcgcaatcaaactcttgccggaaccggattcaccaacaagaccgcggatttcaccttcggttaaggtcatacttacccggtcgacggctttaacccactcatcaccggttttaaattcaatggtcaggttacgaatatcgagtaatggcattattccacccccgcaataatcgcacgacgaacgccatcgccaaggaggttaaccaacaacacgctaatcataattgccgcacctggcagcatgacagtccacggggcgacataaatcagttccagcgcatcaccgagcatcgctccccattcagggctggggagttgtgcgccgagatcgagaaagcccagcgcggcgatatcgagaattgccatgctcagtgcgcgggtgatctcggtgaccagcccggcggtgatgtttggcatcacagcaaaccagagaatattcagcgtacttgcgccatccagacgggcggcgataacgtactctttttccagttcgtcatgcaccatgctgtaaatgctacgtaccatacgcggcagcaatgccagccagacagcaaacatagcgtgggacaaactcggtccggcaaacgctacaacgataattgccaacagcaggctagggatcgccagtaaggtatccagaatatggttaagcaccgcactgcggaggccgtgtgtcgccccggcgaaggtgcccagtaccaggccacagatcgtcgcggcaagcgtcaccacaaatgcgccacccacggttggcgcagctccgctcagtaaacggcttaaaacatcgcgtccgaggtcgtcagtccccaggaagaaagaaacttcgccatagcggctccaactcggcggcaataattgataaccgagaaattgctggtcgatgccgtaaggcgcaaaccagccgccaaaaatacacagtacagccagccccgcgcagccgtacaggccgaccatcgcagaggcgtcactataaaatttgcgccaggcggtacgcagcgtgcccggcgggcgcttttcgctgtatacgctatcgtaaggcataccattccttatgtttcagattatttatcgtaaggcataccattccttatgtttcagagggttagccatggcacccaaaatatcagaaatcacgttaacaataatgaccagactgccacacaccatcactccggcggaaatggctgcgtaatcctgctggcggatggcgttaattaaccagcgccctaaacccggccagctaaaaaccatttcggtgatcatcgccagcgtcagcatggtggaaaactgtaagcccaggcgaggaataaccggcggtaacgcgttatgcagaacgtggcgacgcaaaatagtaaagcggctcaaaccgcgggtcgccgccgcttttacatagttctggtcatacacttcgatagtgctgatacgcatcaggcggatcacttcagttgttggcgcaacgctcagggtgatcacgggcaatatcatatggcggattgcgctcatgatcatttcatcccgccatggactgtcgctaagccaggcatcaatcaacgcaaaaccggtaatcggtttcacttcgtagagcagatcgaaacgcccactaacgggcaaccaacctagcgtgagactacaaaacagcgtcaacagaagcgccagccagaacaccgggatactaaagcccagtaaggcgatggcgttgatcaagttatcctgccacttatggcgcgtaatcccggcaatcatccccacggggatgccaacaatcagcgcaaaaccgaaggcgaggatgcacagttccatcgtcgccgggaagacctcttttaactgttcggcaatcggttgaccgttaatgctggaaacaccaaaatcccagtggatcaggccgttaaaccagaacacccaggcattccacagactcgcgccttgtaacggcgcatgaggggtgaaatagctcaagctgaagccaacgaaggtcagcaggaacaaggtgacaatcaataacaaaatgcggcgtaaggtgaagataatcatggttttttcacctcatcctgtttctcgcgatacaccccagcaaaggaggcgttaccaaacgggctaagtaccagacctttgatatcgtaccgataggcctgcaaacgcaaactgctcgccagcggcaaaatgggcaattcctgcgccagaatactctgcgcttcgtcataggcttcaatacgcgccgccagctgctggctagagagcgccttacgcaatacgctgtcgaatttcggatcgcaccagtgggcgaggttggtctggctatgaattgccgcgcagctcagtaacggacggaagaaactgtccgggtcgttactgtccgtcgcccaaccggataacgtcagatcatggctcatatccatcaaccgcgcctcctgaaagcgaccttctaccggcacaatcaccacttttacgccaacctgcgccatatccgcctgaatcagttcggcagttttcagtggactggggttccacgcctggctacgtgtgggcacccacagtttcagcgttaaattttccagccccaagctcttcaactgttcgcggcttttcgccggattgtattcagtaattttagcctcgttgtcataggcccagctggcgcgcggtaaaatagaggccgccgtttcagccgtaccataatagatggattgcatcaggcgctggttattaatcgccagtgccagcgcatggcggacagcgggattatttagcggcggtttggcggtgttaaatgccagataggcgacgttcatcccaggacgcagcgttaaacgcaagcgcgggtcgtcacgcaaaatggatagctggctggcagcaggccaggccagaacgtcgcattccccggtcaggagtttgctcagacgtccggtgccgccggagcctaaatccaccactacctgcggcattaacggtttaccgcgccagaagtcatcatgacgttgtaggcgaataaattgcccggcgcggtattcgctcaactgatacggaccggtgccgaccggttgacggtcgagttgctcctggcgatcttctttctctaacttccgggcatattctgcgctcatgacgctagcataatgggttgcgaggtgccacaaaaaagaagcatccggctgggcgagtcggaactcaacggtatgattatccagtttgcggacgcttttcacgttatcggcaaattgcaggctgtcgaagtaggggaagttgctgccgttgacgttatgccacgggttgttgcggtcaaaaattcgctggaaggtaaacaccacatcgtcggcattcattttacgagtgggagtaaaccagtcggttttttgaaacggaacatcgcgacgcaggtggaagcgataggtcgcgccgttgtcgagtacttcccagctttcggcaagttccggcatcaggcgataggtatagggatcgacatccagcagtcgatcataaaactgggcggcaagggtatcgacaattaacccactgctcgctttggatgggttaaaggtgttgacttgcccgctgacgcaatagacaaaaccgctgtcgcggatatcagcatgcgggggagattcaggcgcggcgattgcctgaccactcacaagtccagcaatcaccaaaagagagcttaatacctggcgcataatattaagggattttatgtaaagaggctatcttactaatatttaatgacatttgccattaccgtttgtgttcaggggtcgtaatgagggccgtgtggttggtcgttgaacaggtgacgtcgccatctgttcaacattcgtacccgtgatttctctataactataactcacagaacaacttagcgaggagcagagcggtacgatcgtgagaaacccattaaagcacgctgcagtgcgtgtcattgttagccagatgcggcgtgaacgctttatccggacaacgatactgaccgatcgtctgcaattaaatcattactcattaccccattgattcaaaaactctgcgatctcatcaatgcgtacgggattaatccccgcttcagcagccatttcatgttgggcttcttcgctgatctcttcattgttcatcaaacgggtgagcagtaactggaagtagtgggccagcggtgtgcgttcagcctctgcgacaggctctgcgcattcggtcgcgtactcatcggcaatatcaaaatattttagcgggatatcgtggttcattatttgcccctggggttaatgcgctaagcataagggcggatgatagcactcgtgatccgggtcatacatctttttatagttaatggcgcggcgcgttaccctcaggcaggataatgcgccgcgcatccgactattacgtttcactcaccggcgttctgtcaccatcatacaacggcactttgcgatagcggcggatcagataccataaatatgcgccgcctaagctagcccataccagaccgagtgtcagactcgtactctcgaggttaacccacagcacacccaccgtcagcgcgccaaccagcggcatcagcaaatagtggaagtgatccttccagcttttattcattcctttacgccgccagaaatgattaaacacgctcagattcacgaaggtaaacgccaccagagcaccgaagttaattaacgctgtggcggtaactaaatcgaagaacagcgcgctcaacgcgacaatcccgaccataatgacgttgagtgccggagtccgccattttgggtgcacatagccaaacacgcgctccggaaacacattgtcacgccccatcacatacagcagacggctcacgctggcatgactagccaggccagaggctaacgtgttcacaaacgtggtgcagaggaaaatgctctggaagagcttgccgccgacgtacagcgcaatttcaggcagtgcggcatccggatctttaaagcggctgatatcgggaaagaacagctgcataaagaagctcgccgcgataaagataacgccaccgtagaccgccgtcaggaagatggctttcgggatcacgcgtgcggcgtccggcgtctcttcgctaagcgtggtcaccgcatcgaaaccgaggaaggagaaacagacaatcgtcgccccggtaataatcgggatcaggtgcgcgttctcgctgataaacggctgaagactccagacggtgccaacgccttctcctttatgcagtccctgaactaccaggaagataaacaccaccatgatggagatttgcaccagtacaaacagggtattgaagttagcgaccaggttgacgctcttcagattcgcggcggttaaaatggcgacgaaggttaccacccacacccacggcggcacttccgggaagagggcggagagatagattttcgccaacaagacgttaatcatcggcaaaaagagataatccagcaggctactccagccgaccataaatccgacgtgcgggttaatgctcttttgcgcgtaggtataggcgctaccggcctccggaaactggcgaaccagtttgccgtagctgatagcggtaaacagcacacccgccagcgccagcaaataggacgccggaacgtgaccgtcgctaatgccggagacaataccaaaagtatcaaatacggtcatcggcgtgagataggccagacccatcatcaccacctgccacaatttcagactttttcgcagacgggttttgccgggttgcgcagcaatattcagtggactattaatagccataattgctgcctcccctgcgtaataaggtttgcggtcgtgtcgacctgaaatcaaacctgtttagcaagggaagcaaagggggcggagtccagtcagtagcaggaggggcgcatacgcagcctccctcgccatgcggggatttaatcatcggcatcatctcatttcctcgtcacagtcttaatcgttaacggaagcccgttgccgcccgcgctccataacgcgacatccgggaaatgtctggattaccagcaaatgtcaggcctggctccgctcaggccgatgaaacaaccccgcaaggggtattacgcgtttttcaacatccactcaatttctgtttctgtgatgaggcgctcaaactgcaacagctcatcatttttacaggcgtgatagacatggcagaagcgttcgcctaaatagcggcgcaggtgatcattctcgataaactcacccagggcatcgctctggcgaatcggaaagggtaagccttcctgttccagcccgttgccttcgacttcttcctgcaacggcagctcgttatcaaggccatgcaaaataccggcaaaaatcgctgccatcaccagatatgggttggcatcggcacccgccacgcgatattccacgcggtgattatgacggtcgccgcacggaatacgcagggcgacggtgcggttgttatggccccagctcgcctgcgtcggcacatacattcccggctggaagcggcgatagctgttcacgtttggtgccagcaacgccatgctgctcggcatcaggtcaatcatcccggcgagcatctttttcagcagcgggctatcttcgccttccgcgtcagaaagcacgttctcgccacgattattttgcatactgatatggatatgcattccgctgcccgcgtgctcttcatacggcttcgccataaaagtggcgtgcatcttatgcttttctgccatcagacgcaccaggcgttttagtgccagcgcatcatcgcaggcttccagcacgttatcagtatggtaaaggttgatttcaaactgacccgggctggcctcagcgaccgcgccatctgccggaatcagctgtaactgcgccagttcatcaatatcattgagcacgtcggcgaagtggttgaggttatcaacggagtaaacctggctttgtgtattgcggtcatcggtgccaggcgcgcagggcggttgcagatacccttcagcgtcgcgctggcgatccagtaaatagaactccagctctaccgctacgaccgggaacaatccgcgctggcgcagctgctgccacaggcggttaagaacgttccgcggctcaacgtcaaagggagcgccatcttcatcgaccatggtcaggagcatctgaccgataaactctggatcggcggcagaaggagttaaggaaccgagaacaggaacacaggtacgatccggctcgcccatttcctgacccagacctgcttcttctactacgttgcccagaatatccattgcaaatacgctggccgggaaataacaccctttctcgagcttcttcaggctactaacaggaatacgctttccacggaagcaaccatttaaatcggtaagtaaaacatcaacatattgcgtattcgggtagcgctccaggtagcgtttcacttcctgcgtaaaggcgctaccccgcctctcttcactctgctgaacaaagttctctacttcaacgatattggtttccatgattcttcgcctttggtttgttttccgctcgttatcaaagcgtaaaatataatgaccaccattcgaatctgtatgcaaactaaatgtttgtcaaatgttaaattgagtttgcaaaaatgaaaacccactgctagattgaaaaaatattgaacataaaggtcatttaaagcgcagtaatggcgataatttagtccactttgtgagattgagcatggaaaatataatgaacaatccggttatcggtgtcgtaatgtgcaggaacaggcttaagggtcatgcgacccagactctgcaagaaaagtacctgaatgccatcatccatgcaggcggcttgcctattgcgctaccacatgcgctggcggaaccgagtttacttgaacaacttttgccgaaactcgatggcatttatcttcctggtagtcccagcaatgtgcagccgcacctatatggtgaaaacggcgatgagcctgacgccgatcccgggcgtgatcttctgagcatggcgataattaatgccgcactcgaaaggcgcatccccattttcgccatctgccggggtttacaagaactggtggtggcaaccggtggtagcttgcatcgcaagctgtgcgaacagcctgaattgctggaacatcgggaagatcccgaactgccggtggaacagcaatatgcaccgagccatgaagttcaggttgaagaggggggattactgtctgcgttgttacctgaatgtagcaacttttgggtaaactctctacatggacaaggggcgaaggtcgttagcccacggttgcgtgttgaagctcgcagcccggatggcttagttgaggcggttagcgtcatcaatcatccttttgcgctgggcgtacagtggcacccggaatggaacagtagcgagtacgcgcttagccgtatattgttcgagggctttatcaccgcttgtcagcaccatatcgctgaaaaacagcgactctgaccactacagtttaaggaaatgcaaatatgagtgatgagggactggcgccaggaaaacgcttgagcgaaatccgccagcagcaggggcttagtcaacgtcgtgccgccgaactctccgggctgactcacagtgctatcagtacgatagaacaagataaagtcagccctgccatcagtacgctgcaaaagctgctgaaggtgtatggtctgagtctcagcgaattcttttccgagccggaaaaacctgatgagccgcaggtcgtcattaatcaggacgacttaattgagatgggtagtcagggtgtgagtatgaagctggttcataacggtaacccgaatcgcacgctggcgatgatctttgaaacgtaccagccgggcacaaccactggggaaagaattaagcatcagggtgaggaaataggcactgtactggaaggtgaaattgttctgacgattaatggtcaggattaccacctcgtcgcggggcaaagttatgccattaataccggcatcccgcacagtttcagtaatacgagcgcaggtatttgccgaattatcagcgcccatacgcccaccacgttttaatctttttgttctgtaagccgggtaagcgcaatgcgcccggcaatctatacacaaaatcattcaagttgcatcaaggcggcaagtgagcgaatcccgatgagcttactcaggtaagtgattcgggggagcgaacgcagccaaggcagaggcggcttgaaggatgaagtgtatataaagaatgtcgccagaaataaacgggcatacggcccggggatctctgcgccctgacgttcacaaactgcatatatctgatagacgtgaaacaggagtcataatgaattttcatcatctggcttactggcaggataaagcgttaagtctcgccattgaaaaccgcttatttattaacggtgaatatactgctgcggcggaaaatgaaacctttgaaaccgttgatccggtcacccaggcaccgctggcgaaaattgcccgcggcaagagcgtcgatatcgaccgtgcgatgagcgcagcacgcggcgtatttgaacgcggcgactggagtctctcttctccggctaaacgtaaagcggtactgaataaactcgccgatttaatggaagcccacgccgaagagctggcactgctggaaactctcgacaccggcaaaccgattcgtcacagtctgcgtgatgatattcccggcgcggcgcgcgccattcgctggtacgccgaagcgatcgacaaagtgtatggcgaagtggcgaccaccagtagccatgagctggcgatgatcgtgcgtgaaccggtcggcgtgattgccgccatcgtgccgtggaacttcccgctgttgctgacttgctggaaactcggcccggcgctggcggcgggaaacagcgtgattctaaaaccgtctgaaaaaagtccgctcagtgcgattcgtctcgcggggctggcgaaagaagcaggcttgccggatggtgtgttgaacgtggtgacgggttttggtcatgaagccgggcaggcgctgagccgtcataacgatatcgacgccattgcctttaccggtagtacccgtaccgggaaacagctgctgaaagatgcgggcgacagcaacatgaaacgcgtctggctggaagcgggcggcaaaagcgccaacatcgttttcgctgactgcccggatttgcaacaggcggcaagcgccaccgcagcaggcattttctacaaccagggacaggtgtgcatcgccggaacgcgcctgttgctggaagagagcatcgccgatgaattcttagccctgttaaaacagcaggcgcaaaactggcagccgggccatccacttgatcccgcaaccaccatgggcaccttaatcgactgcgcccacgccgacagcgtccatagctttattcgggaaggcgaaagcaaagggcaactgttgttggatggccgtaacgccgggctggctgccgccatcggcccgaccatctttgtggatgtggacccgaatgcgtccttaagtcgcgaagagattttcggtccggtgctggtggtcacgcgtttcacaagtgaagaacaggcgctacagcttgccaacgacagccagtacggccttggcgcggcggtatggacgcgcgacctctcccgcgcgcaccgcatgagccgacgcctgaaagccggttccgtcttcgtcaataactacaacgacggcgatatgaccgtgccgtttggcggctataagcagagcggcaacggtcgcgacaaatccctgcatgcccttgaaaaattcactgaactgaaaaccatctggataagcctggaggcctgaaatgaccgaacataccagcagttactacgccgccagtgcgaataaatatgcaccattcgacacgctgaatgagagtatcacctgcgacgtttgcgtggttggcggcggctataccgggctctcctccgcgctgcatctggcggaagcgggctttgacgtagtggttctcgaagccagtcgcatcggctttggcgcaagcgggcgcaatggcggacagcttgtgaactcctacagccgcgacatcgacgtgatcgaaaaaagctacggcatggacaccgcccgtatgctcggcagcatgatgttcgaaggtggtgagatcatccgcgaacgtatcaaacgttatcagattgactgcgactaccgccccggcggcctgtttgtggcgatgaatgataaacagctcgccacacttgaagagcagaaagagaactgggaacgctacggcaataaacagctggaattgctggacgccaacgccattcgccgtgaagtagccagcgatcgctataccggtgcgctgctggatcacagcggtgggcatattcatccgctaaaccttgccattggcgaagcggacgccatccgcctcaacggcgggcgcgtgtatgaactttctgccgtgacgcagatccagcacaccacgccagccgttgtgcgaactgccaaaggtcaggtgacggcgaagtatgtgattgtcgccgggaatgcgtatctgggcgataaagtagagccggaactggcgaaacgcagcatgccgtgcggcacgcaggtgatcaccaccgaacggctgagcgaagatttagcccgtagcctgatcccgaaaaactactgtgtggaagactgtaactatctgcttgattactaccgtcttaccgccgacaaccgcctgctgtacggcggcggcgtggtctacggcgcgcgcgacccggatgacgttgagcgccttgtggtgccgaaactgctgaaaaccttcccgcagctgaagggcgtgaaaattgattaccgctggacgggcaacttcctgctgaccctgagccgtatgccgcagtttggtcgcctcgataccaacatctattacatgcagggctacagcggccacggcgtgacctgtactcatctagccggacgtttgattgccgaactgctgcgcggcgacgccgaacgtttcgatgccttcgccaatctgccgcattacccgttccccggcgggcgcacgctgcgtgtgccgtttaccgcgatgggcgcggcgtattacagcctgcgcgatcgtctgggcgtttaatttccgattaaccgtgaagagtcaaaaggtgtgaaacatgagcaacaatgaattccatcagcgtcgtctttctgccactccgcgcggggttggcgtgatgtgtaacttcttcgcccagagcgctgaaaacgccacgctgaaggatgttgagggcaacgagtacatcgatttcgccgcaggcattgcggtgctgaataccggacatcgccaccctgatctggtcgcggcggtggagcagcaactgcaacagtttacccacaccgcgtatcagattgtgccgtatgaaagctacgtcaccctggcggagaaaatcaacgcccttgccccggtgagcgggcaggccaaaaccgcgttcttcaccaccggtgcggaagcggtggaaaacgcggtgaaaattgctcgcgcccataccggacgccctggcgtgattgcgtttagcggcggctttcacggtcgtacgtatatgaccatggcgctgaccggaaaagttgcgccgtacaaaatcggcttcggcccgttccctggtagcgtgtatcacgtaccttatccgagtgatttacacggcattagtacacaggactccctcgacgccatcgaacgcttgtttaaaagtgacatcgaagcgaagcaggtggcggcgattattttcgaaccggtgcagggcgagggcggtttcaacgttgcgccaaaagagctggttgccgctattcgccgcctgtgcgacgagcacggtattgtgatgattgctgatgaagtgcaaagcggctttgcgcgtaccggtaagctgtttgccatggatcattacgccgataagccggatttaatgacgatggcgaaaagcctcgcgggcgggatgccgcttagcggcgtggtcggtaacgcgaatattatggacgcacccgcgccgggcgggcttggcggcacctacgccggtaacccgctggcggtggctgccgcgcacgcggtgctcaacattatcgacaaagaaagtctctgcgaacgcgcgaatcaactgggccagcgtctcaaaaacacgttgattgatgccaaagaaagcgttccggccattgctgcggtacgcggcctggggagcatgattgcggtagagtttaacgatccgcaaacgggcgagccgagtgcggcgattgcacagaaaatccagcaacgcgcgctggcgcaggggctgctcctgctgacctgtggcgcatacggcaacgtgattcgcttcctgtatccgctgaccatcccggatgcgcaattcgatgcggcaatgaaaattttgcaggatgcgctgagcgattaatagcccaacgcaataatgtctgatgcgctgcgcttatcaggcctgcaaacgacgtattgattatgtatgccgaataaagcattcacgccgcatccggcaagttgtattgctcaacttcgttaaatctggtgctttttcaacaacgcgcggaactgatgataagttaaccccagtaattcagccgcgcgcttctggttatatttcccttgttgcaaactgagttgcagcaactctttttcctgctgcatctgaaactcacgtaaatccagcggcagtgttggaaggctggtggtttcactaacggcgatagcgtcttcaggcggacgccgtttaaagggatcaataatgatgtcatcaagcggataatcgctggtgccgtggcgatacacactacgttccaccacgtttttcaattcacgaatatttcccggccaacgataattcagcaatgtttctctggcgcgctccgtaaaccccgggaacagaggcagcttgatttcccgacacatctggatggcaaagtattctgccatcaacattatgtcgctttcgcgctcgcgcagtggtggcagttgtacaacatcaaaagccagtcggtcgagcaggtcagcgcgaaaagtgccttcattgaccatcgccgggagatcggcattcgtcgcgcataccaaccgcacattcacctgcaatggttggctgccgccaacgcgctccagttcaccgtactcaatcacgcgcaataatttctcctgcaccatcatcggtgccgtagcgagttcatcaagaaatagcgtaccgccgtcggcacgttcaaatctccctggatgacgtttttgcgcaccggtaaacgcccccgcttcgtgaccaaacagttcggaatccagcagattttcatttaacgccgcgcagttaagggaaataaacggcccttgccaacgggaggagagataatgcaggcggctggcaatcagctctttaccggtgccgcgttcgccgatgatgagcaccggtttgtccagcggtgcgagatggctaacctgttccagcacttcgagaaagctgttcgcctcaccaagtaaattatctttgtattctgccatgatgaaattcgccacttgttagtgtaattcgctaactcatcctggcatgttgctgttgattcttcaatcagatctttataaatcaaaaagataaaaaattggcacgcaaattgtattaacagttcagcaggacaatcctgaacgcagaaatcaagaggacaacattatgggtattttttctcgctttgccgacatcgtgaatgccaacatcaacgctctgttagagaaagcggaagatccacagaaactggttcgtctgatgatccaggagatggaagatacactggttgaagtacgttctactagcgcgcgcgcgttggcagaaaagaaacagctgactcgccgtattgaacaagcgagcgcgcgtgaggttgaatggcaggaaaaagccgaactggcgctgctgaaagagagagaggatctggcacgtgcagcgttaattgaaaaacagaaactgaccgatctgattaagtccctggaacatgaagtgacgctggtggacgatacgctggcacgcatgaagaaagagattggcgagctggaaaacaaattgagcgaaacacgcgctcgccagcaggcattgatgttacgtcatcaggcggcaaacagcagccgcgatgtgcgtcgtcagctggacagtggcaaactggatgaagcaatggctcgtttcgaatctttcgaacgtcgtattgaccagatggaagcggaagcagaaagccacagcttcggtaaacaaaaaagcctggacgatcagtttgccgaactgaaagccgatgatgcaatcagcgaacaactggcacaattaaaagccaaaatgaagcaagacaatcaataataacatccaggcggcgtccgaacgcgccgccgctcatcgtctaaggagtacttatgagcgcgctatttctggctattccgttaaccatttttgtgctgtttgttttaccgatctggttatggctgcattacagcaatcgttctggtcgcagtgaattgagccaaagtgagcagcagcgattagcgcaactggctgatgaagcaaaacggatgcgcgaacgtattcaggcgctggaatctattcttgatgcagaacatccgaactggagggatcgctaatggcgggcattaatctcaataaaaaattatggcgtattccacagcagggcatggtccgcggcgtctgcgccgggattgccaactattttgatgtaccggtaaaactggtgcgtatcctggtggtgctgagcattttcttcggtctggcgctgtttaccctggttgcttacatcattttgagttttgcgcttgatccaatgccggacaacatggcctttggtgagcagctaccttccagcagcgaattgctggatgaagtcgaccgtgaactggcggcaagtgaaacgcgtttacgcgagatggaacgttatgtcacttccgatactttcacgttacgtagccgtttccgtcaactgtgaggaaagttatgaatactcgctggcaacaggccgggcaaaaggtaaagcctggtttcaaattagcaggcaagctggtacttcttaccgcactgcgctatggcccggcgggtgtggcgggctgggcgataaaaagtgttgctcgccgaccgctgaaaatgttgctggctgtggcgctggaaccgctgttaagtcgggctgctaataaactggcacagcgttataaaaggtgaggggagtttcgcaaaaattgttaaatctcaggcgtataatggatggcaattttcatccatagaaggacgcttacatgtttaaaaaaggcttacttgctctggcactggtgtttagtctgcccgttttcgccgctgaacactggatcgatgttcgtgttccagagcagtatcagcaagagcacgttcagggggccatcaatattcccctgaaggaagtgaaagagcgcattgccaccgccgttccggataaaaacgacaccgtgaaagtgtattgcaatgccggacgccagagtgggcaagcaaaagagatccttagcgagatgggatatacccacgttgagaacgccggtggcctgaaagacatcgcaatgccgaaggtcaaaggttaaaagaattcaccatgagcggcgcttatgcgccgtttttttttctgtcacaccttatttacatccccatagattatttgcgtcagctcacaaatacgctttttccctggtaaaaaatgatttcctgcgtgactaaaacccttgtgctcaattgacagtttattttctgcggagtagtctctcgtttcatgggaccgctaccacggaaaggcaacatgaaacagaaaattacggattacctggacgaaatctacggtggaacatttaccgcaactcatttacagaaacttgtaacgcgtcttgagagtgcgaaacgattaattacacagcgacgtaaaaaacactgggatgaaagtgatgtcgtgttaattacctatgccgatcaatttcacagcaatgatttaaaaccattacccacatttaatcagttttaccatcaatggctgcaaagcatttttagtcatgttcatttgttgccgttttatccatggagttctgatgatggctttagcgtaattgattatcatcaggtcgccagtgaagcgggggagtggcaggatattcagcaactcggtgaatgcagtcatttaatgtttgattttgtctgcaaccatatgagcgcaaaaagtgaatggtttaaaaactatttacaacagcatccaggttttgaagatttttttattgccgttgacccgcaaaccgatctcagcgccgtcactcgcccgcgtgcgttaccgttattaacgccattccagatgcgcgatcatagtacgcgccatttatggaccacctttagtgacgatcaaattgacctgaattaccgtagccctgaagtgttgctggcgatggtggatgttttactctgttaccttgcgaaaggtgctgagtatgtccgcctggatgccgttggctttatgtggaaagagccgggaacaagctgcatccatctggaaaaaacacatctgattatcaaactgttacggagcattattgataacgttgcgccaggtacagtgatcattaccgagaccaatgttccgcataaagacaacattgcttactttggcgcaggcgatgacgaagcacatatggtgtaccagttcagcctgccgccactggtgctgcatgcggtgcaaaaacagaacgttgaggcgctttgtgcgtgggcgcaaaacctgacactaccttccagcaacaccacctggtttaacttcctcgcctctcacgatggcatcgggctaaacccgctacggggcttgttgcctgaaagcgaaatattagagctggtcgaggcgttacagcaggaaggtgcattagtaaactggaaaaataatcccgacggtacacgcagtccgtatgaaataaatgtgacctatatggatgcgttaagccgccgtgagagtagcgatgaagaacgttgcgccaggtttatccttgcccatgcgattttgttaagtttccccggtgtgccagcgatatatattcaaagtattcttggcagccgtaatgattacgcaggtgtcgaaaaactcggatataaccgtgcgattaaccgtaaaaaatatcacagtaaagagataacccgagaactgaacgatgaagctacattaaggcatgcggtatatcatgagttgagccgtttaattacacttcgtcgcagccataacgagtttcatccggataataattttaccattgatacgattaatagttccgtaatgcgtattccaagaagtaacgctgatggtaattgtctgactggattgtttaatgtcagtaaaaatattcagcatgtaaatattactaatctgcatggtcgggatctgattagtgaagttgatatattgggtaatgaaataacgctgcgcccctggcaggttatgtggattaaataaaaaggaacatctcatgattaaaagtaaaatcgtgctgttaagtgcactggttagttgcgccctgattagtggctgtaaagaagaaaataaaacgaatgtatccatcgaatttatgcattctagcgtggagcaggagcgccaggccgttatcagtaaattgattgcccgttttgaaaaagaaaaccctggcatcaccgttaagcaagtgcccgtggaagaagatgcctataacactaaagtcattactcttagtcgtagcggtagcctgccggaagtgatcgaaaccagccatgactacgccaaagtgatggacaaagagcagcttatcgatcgcaaagcggttgccacagtcatcagcaacgttggtgaaggcgcgttttacgatggcgtactgcgtattgtgcgtaccgaagatggtagcgcatggaccggtgttcctgtcagcgcctggattggcggtatctggtatcgcaaagatgtgctggcaaaagcggggcttgaggagccgaaaaactggcaacagctgctggacgttgcacagaaactgaatgacccggcgaataaaaaatacggcattgcgctgcctacagcagaaagcgtgttgacggaacaatccttctcccagtttgcgttatccaaccaggctaacgtctttaacgccgaaggcaaaatcacccttgatacaccagagatgatgcaggcactgacctattaccgcgaccttactgccaacactatgccgggttctaacgacatcatggaagtgaaagacgcctttatgaacggcaccgcgccgatggcgatttactccacctatatccttccggctgtgattaaagaaggcgacccgaaaaacgtcggtttcgtggtgccaaccgagaaaaactctgcggtctacggcatgttgaccagcctgaccattaccgccgggcaaaagaccgaagagacggaagcagcagaaaaatttgtcacctttatggagcaggcagacaacattgccgactgggtgatgatgagcccaggtgctgcgctgccggtgaataaagcggtggtgactaccgccacctggaaagacaacgacgttattaaggcgctgggtgaactaccgaatcagctaatcggtgaactgccaaatattcaggtttttggcgcagtaggggataaaaactttacccgcatgggtgatgtgacgggttctggcgtggtgagtagtatggtgcataacgtcaccgtgggtaaagccgatctctctactacgctgcaagcgagccagaaaaaactggatgaactgatcgaacagcactaaacccaggacaggaatccgcaatgaacaggctttttagtggtcgttccgatatgccctttgcgctgctgcttctcgcgcccagcttattactgctgggcggtctggtggcgtggccgatggtgagcaatatcgaaatcagttttttacgtctgccgctcaatcccaacatcgagagtacgtttgttggggtgagcaactatgtgcgtatcctctccgatcccggcttctggcatagcctgtggatgacggtctggtataccgcgctggtggtggcgggcagcaccgtgctcgggctggcggtggcgatgtttttcaaccgcgagttccgcctgcgcaaaaccgcgcgtagcctggtgatcctctcctacgtaacgccgtccattagcctggtgttcgcctggaaatacatgttcaacaacggctacggcattgttaactacctcggcgtcgatcttctgcatctctatgagcaggcaccgctgtggttcgataatccgggcagtagctttgtgctggtggtgctgttcgccatctggcgctacttcccgtatgcctttatcagctttctggcgattttgcagaccatcgacaaaagcctgtacgaagcggcagagatggatggcgctaatgcctggcaacggtttcgtatcgtcacgctgcccgcaattatgccggtcctggcgacggtggtgacactgcgcaccatctggatgttctacatgttcgcggatgtttatttgctgacgaccaaggtcgatattctcggtgtatatctctacaaaaccgcctttgcctttaatgatttaggaaaagcggcggcgatcagcgtggtgctcttcatcattattttcgctgtcattctgctgaccaggaaacgggtgaacctcaatggcaacaaataaacgcacactcagtcgcatcggtttttactgcgggctggcgctgtttctcatcatcacgctgtttccattttttgtgatgctgatgaccagcttcaagggcgcgaaagaggcgatcagtctgcatcctacgctgctgccgcagcagtggacgctggagcattacgtcgacatttttaacccgatgattttcccgtttgtcgactacttccgtaacagtctggtggtgtctgtggttagttccgtggtggcggtattcctcggcattcttggggcttacgcgctttcccgcctgcgctttaaaggtcggatgaccatcaacgccagcttttacacggtgtatatgttctctggcattttgctggtggtgccgcttttcaaaatcatcaccgcgcttggcatttacgacactgagatggcgctgatcatcaccatggtgacgcaaactctgcccaccgccgtgtttatgctgaaaagctacttcgacaccatccccgatgagatcgaagaagcggcgatgatggatggcctcaaccgtctgcaaattatcttccgcatcaccgtgccgttggcgatgtccgggctgatatccgtgttcgtctactgctttatggtggcgtggaacgactatctgtttgcgagcattttcctctccagcgccagcaatttcaccttaccggtgggcctgaacgcgctgttcagtacgccagattacatctggggacggatgatggcggccagtctggtgaccgcattgccggtggtgattatgtatgcgcttagcgaacgttttattaagagtggtttgaccgccggtggcgtgaagggctaaagcggccagtttctttacaaggagttttaaatgaaaaagttagtagccacagcaccgcgtgttgctgcgctggttgagtatgaagatcgggcgattttagctaatgaagtgaagatccgcgtgcgtttcggcgcaccgaaacacggaacggaagtggtcgacttccgcgccgccagcccgtttattgatgaagactttaacggcgaatggcagatgttcactccgcgtccggcagatgcgccgcgcggcattgagtttggcaaattccagcttggcaacatggtggttggcgacattatcgagtgcggcagcgacgttaccgactacgcggtgggcgacagcgtatgcggctacggcccgctctccgagacggtcatcattaacgcagtgaataactacaagctgcgcaaaatgccgcaaggcagctcctggaaaaacgccgtctgctacgacccggcgcagtttgccatgagcggcgtgcgcgatgccaacgtgcgcgtaggggattttgtggtggtggtagggcttggcgcaatcggtcaaattgccatccaactggctaaacgcgctggcgcttctgtggtgattggcgtcgatcctatcgcccatcgctgtgatattgcccgtcgccacggcgcggatttctgccttaaccccatcggcactgatgtaggtaaagagatcaaaacgctgaccggcaagcagggtgccgatgtgattatcgaaaccagcggctacgccgacgcgctgcaaagcgcgctccgcggtctggcttatggcggcaccatctcctatgtcgcgtttgccaagccgtttgccgaaggttttaacctcggacgcgaagcgcatttcaataacgccaaaattgtcttctctcgcgcgtgcagcgaaccgaacccggattatccgcgctggagccgcaagcgtattgaagaaacctgttgggaactgctgatgaacggttatctcaattgcgaagatttaatcgacccggtggtgacctttgccaatagcccggaaagctatatgcagtatgtcgaccagcatccggaacagagcatcaaaatgggcgttacgttttaattcaaaggaatgaaaaaaatgaaaatcggcacacagaatcaggcgttctttccggaaaacattctggagaaatttcgttatatcaaagagatgggcttcgatggttttgagattgacggcaaactgctggttaacaacatcgaagaagtcaaagcggcgatcaaagaaaccggtttaccggtgaccaccgcctgcggtggctatgacggatggattggcgactttatcgaagagcgtcgtcttaatggcttaaagcagatcgagcgcattctcgaagcgctggcagaagtgggcggtaaaggcatcgtcgttccggctgcgtggggcatgtttaccttccgcttaccgccgatgaccagcccgcgtagcctggacggcgaccgcaaaatggtgagtgattccctgcgcgtactggaacaggtcgccgcgcgtaccggaaccgtggtgtatctcgaaccgttaaaccgctatcaggatcatatgatcaacaccctcgccgatgcccgccgttacatcgtcgaaaacgatcttaaacatgtacagattatcggcgatttctatcacatgaatatcgaagaagataacctggcgcaggcgctgcatgacaaccgcgacctgctcggtcatgtgcatattgcggataaccatcgctaccagccgggcagcggcaccctggatttccacgcgctgtttgaacagctgcgcgcggataactatcagggctatgtagtgtacgaagggcgtatccgggcggaagatcctgcccaggcgtaccgtgatagcttggcctggttgcgtacctgctaagaggtctttgtgaaaagtgcaatgacaagctctccgctgcgggtcgcgataataggcgcaggccaggtggcggataaggttcatgctagctactactgcacccgcaacgatctggaactggtggctgtctgtgacagccgcctttcccaggcgcaggcgctggcagaaaaatacgggaatgcatccgtgtgggacgatccgcaggccatgctgctggcggtgaaacctgatgtggttagcgtctgcagtcctaaccgttttcattacgaacataccctgatggcactggaagcgggctgccatgtgatgtgcgaaaaaccgcccgccatgacgccagaacaggcgcgggaaatgtgcgataccgcgcgcaaactgggcaaggtgctggcctacgactttcaccatcgttttgcgctcgatacgcaacagctgcgtgaacaggtgaccaacggcgttttgggagagatttacgttaccaccgcccgcgccctgcgtcgctgcggcgttcccggctggggtgtctttaccaataaagaactgcagggtggtggcccgctgatcgacatcggcattcatatgctggatgctgcgatgtatgtgctgggctttccggcggtgaaaagcgtgaatgcgcatagctttcaaaagatcggcacgcaaaagagctgtggtcaatttggtgagtgggatccggcaacttacagcgtcgaagatagcctgtttggcaccattgaatttcataacggcggcattctgtggctggaaacgagttttgcactcaacatccgcgaacagagcattatgaacgtcagcttttgtggtgataaagctggtgcgacgctgtttccagcacatatctacaccgataacaacggtgaattaatgacgctgatgcaacgggaaatagcagacgacaaccgccatttgcgcagcatggaagcctttatcaatcacgtacagggcaagcccgtgatgatagccgacgccgagcaggggtacatcatccagcaactggtggcggcgttgtatcaatccgcagaaacagggacgcgtgtggaattatgaccaggccagtaacgttaagtgaaccccatttcagccagcataccctgaacaagtatgcaagcctgatggcgcaggggaacggctatcttgggcttcgcgccagccatgaagaagattacacgcgccagacgcgagggatgtatctggcggggctgtatcatcgggcgggaaaaggtgaaatcaacgaactggtgaacctgcctgatgtcgtggggatggagattgccataaatggtgaggttttcagcttatcccacgaagcctggcagcgtgagcttgactttgccagtggcgaattacgccgcaatgttgtctggcgtaccagcaacggcagtggttacaccatcgccagccgtcgctttgttagcgcagaccaactgccgctcattgcgctggaaatcactattacgccactggacgccgacgcgagtgtgctgattagtacaggcattgacgccacgcaaaccaatcacggtcgccaacatctcgacgaaacccaggtgcgggtgtttggtcagcatctgatgcaggggagctacaccacccaggatggacgcagtgatgtggccatcagctgttgctgtaaggtgagcggtgatgtgcagcaatgctataccgccaaagagcgccgtttactgcaacataccagtgcgcagcttcatgcaggcgagacaatgacgttgcaaaaactggtgtggatcgactggcgggatgacaggcaagctgctttagacgagtggggcagcgcgagccttcgccagcttgaaatgtgcgcgcagcagagttacgaccaacttcttgcagcaagtacagaaaactggcgtcaatggtggcagaaacgtcgtatcacggtaaatggcggcgaagcgcacgatcagcaagcgttagattatgcgctttatcatctgcgcatcatgacgcctgcccacgacgagcgcagcagcattgcggcaaaaggcttaaccggcgaaggctacaaaggccacgttttctgggatacagaagtatttttgttaccgtttcatctgtttagcgatccgacggttgcccgaagtttactgcgttatcgctggcacaacttgccaggcgcgcaggagaaagcgcgacgcaacggctggcagggcgcgctatttccgtgggaaagcgcgcgcagcggcgaagaagagacgccggaatttgccgccattaacattcgcaccgggctgcggcaaaaagtggccagcgcgcaggcggaacatcatctggtggccgatatcgcctgggcggttattcaatactggcagaccacgggggatgaaagtttcattgcgcatgaaggcatggcgctacttctggagacggcaaagttctggattagccgcgcggtgagagttaacgatcgtctggaaattcatgatgttattgggccagacgaatataccgaacatgtcaataataatgcatacaccagctatatggcccgctacaacgttcaacaggcgctgaatattgcccgccagttcggctgtagcgacgatgcgtttatccatcgcgccgaaatgttcctcaaagagctatggatgccagaaattcagcccgacggcgttttgccgcaggatgatagctttatggctaagccggcgattaatctggcgaaatacaaagcggcggcggggaagcaaaccatactgctggattatagtcgcgcagaagtgaacgagatgcagatcctcaaacaagctgatgtggtgatgctcaattacatgctgccggagcagttcagtgcggcaagctgtcttgccaatctgcaattttatgaaccgcgcactattcacgacagcagtttaagtaaagcaatccacggcattgttgccgcacgctgtggcctgctgacccaaagttatcagttctggcgcgaggggactgaaatcgatcttggtgctgatccgcatagttgtgatgatggtatccatgctgccgcaactggcgctatctggctgggggcgattcagggttttgccggggtgagcgtgcgtgacggtgaattgcatctcaatccggcgttacctgagcagtggcaacagttgtctttccctctgttctggcagggctgcgaattacaggtcactcttgacgcgcagcgtattgcgattcgaacttctgcgcccgttagtctgcgtttgaacggtcagcttataaccgtggctgaagaatctgttttctgtttgggtgattttattttgcccttcaatgggaccgctaccaaacatcaggaggatgaatgaaactgcaaggggtaattttcgatctggatggtgtaatcaccgataccgcgcatctgcatttccaggcgtggcagcagattgccgctgaaattggcatcagcattgatgcgcagtttaacgaatccctaaaagggatcagccgcgatgagtctctgcggcgcattctgcaacacgggggcaaagagggcgactttaacagccaggagagggcgcaactggcgtatcgcaaaaatctgctctatgtccacagtctacgcgagttgacggtcaacgctgttctacccggcattcgctctttgctggcagatctccgtgcacagcagatcagcgttgggctggcttctgtctccctgaatgcgccgacgattttagcggcgctggagctgcgcgagtttttcaccttctgcgcggatgcttcccaacttaaaaacagcaaaccggacccggaaatctttctcgccgcctgtgcagggctgggcgtgccgccgcaggcatgtatcggcattgaagatgcgcaggcgggcattgacgccattaacgccagcggtatgcgcagcgtggggatcggcgcgggcttaaccggggcgcaattactgttgcctagtacggaaagtctcacctggccgcggttaagcgccttctggcaaaacgtataacaaaggaatcaacatggctcagcttagcttacaacatattcaaaaaatctacgataaccaggtgcatgtggtgaaggacttcaacctggaaattgccgataaagagttcatcgtgtttgtcggcccgagcggctgcggtaagagcaccaccctgcgcatgattgccgggcttgaggagatcagcggcggcgatctgttgatcgacggcaaacgaatgaatgacgttccagccaaagcacgcaatatagcgatggtgttccagaactacgcgttgtatccgcatatgacggtttacgacaacatggcgtttggtctgaagatgcaaaaaatcgccaaagaggtgattgatgagcgggtgaactgggcggcgcaaattctcggcctgcgtgagtacctgaaacgtaagccgggggcgctttccggcgggcaacgtcagcgagtggcgcttgggcgggcgattgtacgcgaagcgggcgtgtttttaatggatgaaccgctctctaaccttgatgccaagctgcgcgtgcaaatgcgcgcagagatcagcaagctgcatcagaaactgaacaccaccatgatctacgtgacccacgatcagaccgaagcgatgaccatggcgacgcggattgtgattatgaaagacgggattgttcagcaagtaggtgcgccgaaaaccgtttataaccaacccgcgaatatgtttgtttccggatttattggaagtccagcgatgaattttattcgcggcacgatcgatggcgataaattcgttacggaaacgcttaaattaaccattcccgaagagaaattagcggttctgaaaacacaggaaagtttgcataagcccatcgtgatgggaatacgaccggaagatattcatccggacgcgcaagaggaaaataacatttccgccaaaattagcgtggcagaattaaccggtgcggaatttatgctctacaccacggttgggggcacgagttaaacggttgggggcacgagttagtggtccgtgctggtgcgttaaatgattatcatgcaggagaaaatatcactattcattttgatatgacgaaatgtcatttctttgatgcagaaacggaaatagcaattcgctaaatacagggggaaggcattcccccaggataatacaaggaacaataatgaaaaagttattaccctgtaccgcactggtgatgtgtgcgggaatggcctgcgcacaggccgaggaaaggaacgactggcactttaatatcggcgcgatgtacgaaatagaaaacgtcgagggttatggcgaagatatggatgggctggcggagcctagtgtctattttaatgccgccaacgggccgtggagaattgctctggcctattatcaggaagggccggtagattatagcgcgggtaaacgtggaacgtggtttgatcgcccggagctggaggtgcattatcagttcctcgaaaacgatgatttcagtttcggcctgaccggcggtttccgtaattatggttatcactacgttgatgaaccgggtaaagacacggcgaatatgcagcgctggaaaatcgcgccagactgggatgtgaaactgactgacgatttacgtttcaacggttggttgagcatgtataaatttgccaacgatctgaacactaccggttacgctgatacccgtgtcgaaacggaaacaggtctgcaatataccttcaacgaaacggttgccttgcgagtgaactattatctcgagcgcggcttcaatatggacgacagtcgcaataacggtgagttttccacgcaagaaattcgcgcctatttgccgctgacgctcggcaaccacagcgtgacgccgtatacgcgcattgggctggatcgctggagtaactgggactggcaggatgatattgaacgtgaaggccatgattttaaccgtgtaggtttattttacggttatgatttccagaacggactttccgttagcctggaatacgcgtttgagtggcaggatcacgacgaaggcgacagtgataaattccattatgcaggtgtcggcgtaaattacagcttctgataatgggctaaattgccggatgcggcgcgagtactttatccgatctataaatgtaggccggataagatgcgctagcatcgcatctggcattcaggcaaggtagctggtatttatttcagcgtcatatgcgtggcaacggtaatattctgtggactcggttttccagaaattaagcggaataataactcgcagctttgttgacctaactcctgcgtcggaacatcgatgccgcccggtgcaggcgttaaaataaaactcagcgtttcattgctataacccaccaccgctaactgctgcggaatagcaatatttttctctgctgccgcacgataaatgctcattaatttcaggctgtcagtggcaaacaccgcctcaggcaacggactctggcttaataattgccgtgctgcttttaatgcagtttcatgggtataaccgccatcaacaatccattcatcacgcactgcaatattatgcgcagccaggctctgcttataaccattaacgcgatcaacgctaacatggacatcaagcggagcatgcaggcaggcaatattttgatgcccactttcaattaatgcatcggtcaacgcaatgctgtcgccaaaattatcggtatcgacagaataaacatgggcatattgaccttcaactttgccaatcaccaccaccggaatatcatatttatcgagttgggcaaaaaaactctcatccgctgggctactgagcataataatgcctttaatcattttctgcttaattttgctttcgcatttttgcagatcttctgccggattgtggctcgtttgtaatatcacgtcgaaaccttcttcttcagctttggcggtgatggcatgcaaaacttcagagaaaaacggattacccgccgtagttttggtgctacgggtagaaatcaccataatggcatcaaaaccgctagaggtcagcgcgcgggccagcttgtttggctgatactgtaattcttcaatggcccgtaacactttttcgcgcgcttccggggagatattagtttgcttattcagcacgcgacttacggtggatttacttacgcctgcaaccctggcaatatcataaatagtaggggacataggtcaggaactccgtccgaacgtgaatgctgcacatcttatggagttcgccggtcgatgacaacacgggcagttgataatcaatggcctggcccccacattcatatccttacgaatgattttttttctggtcttcagagcagcacaggacagcaatgaagcgacttaaaaatgaactcaatgcgctggtgaatcggggtgtcgacagacatctgcgcctcgctgtaaccggacttagccgcagcggcaaaacagcgtttatcaccgcgatggttaatcagttgcttaatattcacgccggagcacgtttgccgctgttaagtgcggtgcgtgaagagcgcctgctgggcgtgaaacgcattccccagcgtgactttggcattccgcgcttcacctatgacgaagggctggcgcagttatatggcgatccacccgcctggccaacgccaacgcgcggcgtcagtgaaatccgcctggcgctacgttttaaaagcaatgatagcctgctacgccactttaaggatacctccacgctgtatctggaaattgtggattatcccggcgaatggttgctcgacctgccgatgctggcgcaggactatttaagctggagccgccagatgacgggcttactcaatggtcagcgcggagaatggagcgcgaaatggcgaatgatgagcgaagggctggacccgctagcgcctgccgacgaaaaccggctggcggacattgccgccgcgtggaccgattatctccaccactgtaaagagcaggggctgcactttattcagcctgggcgctttgtcttgccgggagatatggcaggtgcgcccgcgctgcaattcttcccgtggccggatgtcgatacctggggcgagtccaaactggcgcaggccgataagcataccaatgccggaatgctgcgcgagcgctttaattattactgcgagaaggtggtgaaggggttctataagaatcattttctgcgctttgaccgccagattgtgctggtggattgcctgcaacctctcaacagtgggccacaggcatttaatgatatgcgtctggcactgacgcagctgatgcaaagttttcactacgggcagcgtaccctgttccggcgtttgtttagcccggttatcgataagctattgtttgctgccactaaagcggaccatgtgaccatcgatcagcacgctaatatggttagtttactgcaacaactgattcaggatgcctggcaaaatgcggcgttcgaagggatcagcatggactgcctggggctggcgagtgttcaggcgaccaccagcggcattattgatgttaacggtgagaaaatcccggcgctgcgtggtaatcgacttagcgatggcgcaccgctcactgtttatcctggcgaagttcccgcacgtttgcctggtcaggcgttctgggataagcaaggcttccagtttgaggcatttcgtccgcaggtgatggatgtcgacaaaccactaccgcatattcgtcttgatgctgcgctggaatttttaataggagataaattgcgatgaccgaaccgttaaaaccacgtattgatttcgacggtcctctggaggtcgatcagaatcctaaattcagggcgcagcagacctttgacgaaaatcaggcgcaaaattttgccccggccacgctcgacgaagcgcaggaagaagaggggcaagtcgaagcggtaatggacgcagcgttacgtccgaaacgcagcctgtggcgcaaaatggtgatgggagggctggctctgtttggcgcaagcgttgtcgggcagggtgtacagtggacaatgaatgcctggcaaacccaggactgggtggcgctgggtggatgtgccgctggggcattgattatcggcgctggcgtaggttctgtggtaacagagtggcggcgcttatggcgcttgcgacagcgcgcccatgaacgcgacgaagcgcgtgatttattgcatagccacggcacgggcaaaggccgcgcattttgcgaaaaactggcgcagcaggcgggtattgatcagagccatccggcgctgcaacgctggtatgccagtatccatgaaacgcaaaacgaccgtgaagtggtcagcctgtatgcgcatttggtccagccagttttagatgcccaggcgcggcgcgaaatcagccgtagcgcggcggaaagtacgttgatgattgcggtcagcccgctggcgttggtcgatatggcgtttatcgcctggcgcaatctgcgtttaattaatcgcatcgccacgctgtatggcattgaactggggtattacagccgtttgcgtctgtttaagctggtattgctgaatatcgcttttgccggagccagcgaactggtgcgcgaagtggggatggactggatgagccaagatctcgctgctcgtttgtctacccgcgcagctcaggggattggtgcaggacttctgacggcacgactcgggattaaagctatggagctttgccgcccgctgccgtggattgacgatgacaaacctcgcctcggggatttccgtcgtcagcttatcggtcaggtgaaagaaacgctgcaaaaaggcaaaacgcccagcgaaaaataatgcaatatcgggtgctgaccggatatctttacgccgaagtgcccgtttttccgtctttgtgtcaatgattgttgacagaaaccttcctgctatccaaatagtgtcatatcatcatattaattgttcttttttcaggtgaaggttcccatgcgtctggaagtcttttgtgaagaccgactcggtctgacccgcgaattactcgatctactcgtgctaagaggcattgatttacgcggtattgagattgatcccattgggcgaatctacctcaattttgctgaactggagtttgagagtttcagcagtctgatggccgaaatacgccgtattgcgggtgttaccgatgtgcgtactgtcccgtggatgccttccgaacgtgagcatctggcgttgagcgcgttactggaggcgttgcctgaacctgtgctctctgtcgatatgaaaagcaaagtggatatggcgaacccggcgagctgtcagctttttgggcaaaaattggatcgcctgcgcaaccataccgccgcacaattgattaacggctttaattttttacgttggctggaaagcgaaccgcaagatagccataacgagcatgtcgttattaatgggcagaatttcctgatggagattacgcctgtttatcttcaggatgaaaatgatcaacacgtcctgaccggtgcggtggtgatgttgcgaagtacgattcgtatgggccgccagttgcaaaatgtcgccgcccaggacgtcagcgccttcagtcaaattgtcgccgtcagcccgaaaatgaagcatgttgtcgaacaggcgcagaaactggcgatgctaagcgcgccgctgctgattacgggtgacacaggtacaggtaaagatctctttgcctacgcctgccatcaggcaagccccagagcgggcaaaccttacctggcgctgaactgtgcgtctataccggaagatgcggtcgagagtgaactgtttggtcatgctccggaagggaagaaaggattctttgagcaggcgaacggtggtagcgtgctgttggatgaaataggggaaatgagtccacggatgcaggcgaaattactgcgtttccttaatgatggcactttccgtcgggttggcgaagaccatgaggtgcatgtcgatgtgcgggtgatttgcgctacgcagaagaatctggtcgaactggtgcaaaaaggcatgttccgtgaagatctctattatcgtctgaacgtgttgacgctcaatctgccgccgctacgtgactgtccgcaggacatcatgccgttaactgagctgttcgtcgcccgctttgccgacgagcagggcgtgccgcgtccgaaactggccgctgacctgaatactgtacttacgcgttatgcgtggccgggaaatgtgcggcagttaaagaacgctatctatcgcgcactgacacaactggacggttatgagctgcgtccacaggatattttgttgccggattatgacgccgcaacggtagccgtgggcgaagatgcgatggaaggtagcctggacgaaatcaccagccgttttgaacgcagcgtattaacccagctttatcgcaattatcccagcacgcgcaaactggcaaaacgtctcggcgttagtcataccgcgattgccaataagttgcgggaatatggtctgagtcagaagaagaacgaagagtaagcgcgaatatgcctgatggtgcaacaccatcaggcatattaaattatgctttcagtacagccagagctgcttcgtaatccggctcggtggtgatttcatccaccagctggctgaaaatcacattgtcattttcgtcaataaccacaacggcacgcgctgccagacctttcagtgggccatcagcaattgccacaccgtaagcttgcagaaattcagcgttacggaaagtggagagggtgataacgttgttcagaccttctgcgccgcagaaacgagactgggcgaacggcagatcggcagagatacacagcacaacggtgttgtcgatctcagttgccagttggttaaacttacgtacacttgcggcgcaaacaccggtatcaatactcgggaaaatgttcagcactttgcgtttacccgcaaactgaccgagggtgacgtcagacagatcttttgccacgagagtaaaagtctgcgctttgctacccgcctgcgggatggaattggcgactgtaaccgggttgccctggaaatgaacggtttgactcatgattatctttcctgtttacatatagttaacgtcacacctagtttatgctaactgtcaataacacagcaaacgctattacagggtctccttacaacaactgtcaacgcagtttgtaattaaaagattaacccatatctggtgaatgaaacagtgatgaaccttctgccagatcaataaatcagaaaaatttaatgatatgacagaaggatagtgagttatgcggaaaaatcaggcaacgttacgcgtatgaccagcaagctgggccagcgcatcgttattttcgatggtgatgtatttacctttgactgccagcatgccgcttttctggaagcgacccagcagacggctgatggtttctaccgtcaggcccagatagttaccgatatcgccacgagtcatcgtcaggcggaattcacgaggggagaagccgcgttgggcaaaacgacgggacaggttgtagatgaatgcagccagacgttcctcggcatttttcttgctcaacagcaggatcatgtcctgatcgcctttgatttcaccgctcatcagacgcatcatctgctgacgcagattcggcattttaccggacaaatcgtccagcgtttcgaacgggatttcacataccatgctggtttccagcgcctgcgcgaagctcgggtgatggccgctgccgatggcgtcaaatcccaccaggtcgcctgctaaatggaaaccagtgatttgctcgtcgccttgctcagtgatggtataacttttaatcgtaccggagcggatggcataaaggcttttaagttcatcaccagccttaaacagcgtctggcctttctgaataggcttcttccgctcaatgatattatcaagctgatcaagctcatgttcgttgagtgtgaacgggatgcaaagctggctgatgctgcaatcctggcaatggatagcacaaccgccagactgaatgcgccgtataattcgcttttccgggatcataggtctgctcaagccgtaattgatatttgtcaattttaacatctttttagggagcaagtaagtctaagcaaaccttaacagcagagaattccgatattagatgtaaatatatgtctatctatttgaaaacccttaagttgttaagggtaactttacataaaagtgtgaacaagctggcacaaattgtttaatgtttacagcaaaagataaccttcatggcgcaataaccactcttttcgctgaactccgcctgcatatccggtcatggtgccgtttcggccaataacccgatggcaaggtacgacgatgctgatgggattgcttccgtttgccgcaccaacggcacgcgccgcgccaggacggcccaattgctcagccagttggccgtaatgcattacctgcccgcaggggatagtgcgtagtgttttccagacttcgcgctgaaatggcgtcccccccgtagcagtgggaagcgtatcaataatgctaagattaccggcaaaatattcacgaagcttgtcgcttaaaccgcctggattggtggcagaaatgcgctcatagccttctttgcgataatggatgtccagcagctgcaccatgcgttcgctgtactcttcccattcaaccgcccgcaggcgaaattgctcatcgcaaatcacccacagtggacccagtggcgtggcaattttttcttcaagtaatctcagcatccgttctctcttaagacaaacgtgggtaaatacccggacctatcggcagaccgacaagataccacgccagcacatcgcagccatactatgcagaaacaatgctgtcgatggctgcttttgcgtcagactgtgctttcgctgccatttccggaccgtatgcgatcccttcggcgaagacaaatttcacatcggtaatgccgataaagccgaggaacgtggacagatacggcgtcaccaggtccgttggtccatctttgtggatcccgccgcggctggtaataacgatggcttttttacccgttaccagaccttccggaccgttctcggtatagcggaaagtaacgcctgcgcgggcaaccaggtcaaaatagtttttcaactgagtcgagatgttgaagttatacatcggtgccgcaataacgataacgtcgtgggctttcagctcggcaatcaactcatcggaaagtgccagagcttcctgctgacgcggagtcagcggcgcatcgctcggacgcagagcgccaaccagttcgccatccagtaccggaatcggatttgcagccaggtcgcgaacggtgatttcatcagcggagtgcttttcgcgccattgttcaacaaaataatcggacaactgattagactgagagtaccctgccaggatgctggatttaagaactaataccttgctcatggtgtttccttatagatgtttgaatgggcgatgccccgttgcttgttgacactttattcacaatcctgccacagagatagcgcaataaatcgaagcctatgttcgaatttattgaacaacgcatagaaagccgcgatgtggtactctatatctatcatttaaaagaaaattaatcaggcagactactgcccactaacgttatgacagaacaacaaaaattgacctttacggccttgcagcagcggctggattcgctgatgctgcgtgacagactgcgtttttctcgccgtctgcacggcgtgaagaaggttaaaaatcctgatgcacaacaggccattttccaggagatggcgaaagagattgaccaggcggcagggaaagtcctgctgcgtgaagcggcacgaccggaaattacttatcctgacaatttaccggttagtcagaaaaaacaggacattctcgaagcgattcgtgatcaccaggtggtgatcgtcgccggggaaacgggttctggtaaaacgactcagttaccgaaaatctgtatggagctggggcgcgggattaaaggactgatcggccatacccagccgcgtcgtctggcggcaagaacagtggcgaaccgtattgcggaagagctgaaaacggagccgggcggttgcatcggttacaaagtgcgtttcagcgatcacgtaagtgataacacgatggtcaagctgatgaccgacggtatcctgctggcggagatccagcaagaccgcctgctgatgcagtacgacactatcattattgacgaagcgcacgaacgcagcctgaatatcgattttttgctcggctatttgaaagagttgctgccgcggcgtcctgacctaaaaatcattatcacttccgcgactatcgacccggaacgctttagccgccactttaataatgcgccgattattgaagtctccggtcggacctatccggtggaagtgcgctatcgcccgattgttgaagaagccgatgacaccgagcgcgatcagttgcaggcgatttttgacgccgtagacgaactgagtcaggaaagccatggcgacattctgatctttatgagcggcgagcgggaaatccgcgataccgccgatgcgctgaacaagctgaacttacgccataccgaaatcttgccgctttatgcgcggcttagcaacagcgaacaaaatagggtattccagagccacagcggacggcgcattgtgctggcgaccaacgtcgcggaaacgagcctgaccgtaccggggattaaatacgttatcgaccccggtacagcgcgtatcagccgctacagctatcgcaccaaagtgcagcgtttgccgattgagccgatttcccaggcgtctgccaatcagcgtaaaggccgctgtggtcgtgtgtccgaagggatctgtattcgtctctattccgaagacgatttcctcagccgcccggagtttaccgatccggagattctgcgtaccaacctggccagcgttattttgcagatgaccgcgctggggctgggcgatatcgctgcgttcccgtttgtcgaagcaccggataaacgcaatatccaggatggcgtgcgtctgctcgaagagctgggcgcgatcaccactgatgaacaggccagcgcctataaactgacgccgctcggtcgccagctcagccagttgcctgtcgacccacgtctggcgcgtatggtgctggaagcgcaaaaacatggctgcgtgcgtgaggcgatgattatcacgtccgcgctctccattcaggatccgcgcgaacgtccgatggacaaacagcaggcaagcgacgaaaaacatcgtcgcttccacgacaaagagtctgactttctcgcgtttgtgaatctgtggaattatcttggcgagcagcaaaaggcgctttcttccaacgccttccgtcgcctgtgtcgtaccgattatctcaactatctgcgcgtgcgcgaatggcaggatatctacacccagttgcgtcaggtggtgaaagaacttggcattccggttaacagcgaaccggcggagtatcgcgaaattcacattgcgttgctgaccggtttactttcccatatcggcatgaaagatgccgataaacaagaatataccggcgcacgtaacgcgcgtttctccatcttccccggttctggtttattcaaaaaaccgcctaaatgggtaatggtggcggaactggtagaaaccagccgcctgtgggggcgcattgctgcgcgtatcgacccggaatgggtggagccagttgctcagcatttgattaaacgcacctacagcgaaccgcactgggaacgggcgcagggcgcggtgatggcaacggaaaaagtcactgtttatggtttgccgattgttgccgcgcgcaaggtcaactacagccagatcgatccggcgttatgtcgtgaactctttattcgccacgcgctggtggaaggtgactggcagacgcgtcacgcattcttccgtgaaaacctgaaactacgggcggaagtagaagagctggaacacaaaagtcgtcgccgcgatattctggttgatgacgaaacgttgtttgagttctacgaccagcgcatcagccacgatgtaatctccgctcgccacttcgacagctggtggaaaaaagtcagccgcgaaacgcctgatttgctcaactttgaaaaaagcatgttgatcaaagagggcgcagaaaaaatcagcaagctggattacccgaacttctggcatcagggcaatctcaagctgcgtttgagctatcagtttgagcccggcgcggatgctgacggtgtgaccgtacatattccgctgccgttacttaaccaggttgaggaaagcgggtttgaatggcagatccccggtctgcgccgcgaactggtgattgctctgattaaaagcttgccgaaaccggtacgccgtaattttgtacccgcgccaaactatgccgaagcgtttttaggccgcgtcaaaccgctggagttaccgttgctcgacagccttgagcgcgagttacggcggatgaccggcgttaccgttgaccgcgaagactggcactgggatcaggtgcccgatcacctgaaaattaccttccgcgtggtggatgacaaaaacaagaagctaaaagaagggcgcagcctacaagatctgaaagatgcgctgaaaggcaaagtgcaggaaacgctatctgcggtggcggatgacggtatcgagcagagcggcttacatatctggagttttggtcagctgccggaaagctacgaacagaagcgtggcaactacaaagtgaaggcgtggccggcgctggtggatgagcgcgacagtgtggcgatcaaactgtttgataacccgctggagcaaaagcaggcaatgtggaacggtcttcgccgtctactgctgctgaatattccaagcccaatcaaatatttacatgaaaagttaccgaacaaagccaagctgggactgtactttaacccgtatggcaaagtgctggagctgatcgacgactgtatctcctgcggtgtggataaattgatcgacgccaatggtggcccggtctggacggaagaaggctttgctgcgctgcatgaaaaagtgcgtgccgaactgaacgacacggtggtggatattgcgaagcaggtcgagcaaatccttacggcagtgttcaatatcaacaaacgtctgaaagggcgggtggatatgaccatggcgctggggctttctgacattaaagcgcagatgggcgggttggtatatcgcggttttgtcactggtaacggcttcaaacggctgggcgacacgctgcgatatttgcaggcgattgaaaaacggctggaaaaactggcggttgatccacatcgcgaccgtgcgcagatgctgaaagtcgaaaacgtccagcaggcgtggcagcaatggatcaacaaactgccgcccgcacgtcgtgaggatgaagacgtgaaagagatccgttggatgatagaagagttgcgcgttagttacttcgctcaacaacttggtacgccttatccgattagtgataagcgtattttgcaggcgatggagcagattagcggttaaccctgctatttgcctgataaagaaaaaacccggtaagcatttagcgccgggttttttattaattctaaaacggtaagggtaaaaattcaggaattcagaaaaatacaattctctgctgcaagatgaataatgtttatctacagcatttccttaaaagatatgtcaggcttgcggagtggcggttaaggacatacgatttcctcctttcagagtgctccgcttctcactattatctcacgcagtattcttaagggaacgataaggaggaaccatgaacattaccccgtttccgacgcttagcccggcaactatagatgccataaatgttatcggacagtggctggcgcaggatgatttctccggtgaggtgccgtatcaggccgattgcgtgatccttgcaggcaatgcggttatgccgactatcgatgcggcatgtaagattgcccgcgatcagcaaattcctttactgattagtggtggtatcggtcacagcacaacttttttgtatagcgccatcgcacagcatccgcactacaacactatccgcaccactggcagagcagaagcgaccatcctggcggatatcgctcatcagttctggcacattccgcatgaaaaaatctggattgaagaccagagtacaaactgcggtgaaaacgcacgctttagcatcgcgctattgaatcaggccgtagaacgagttcatacggctatcgttgttcaggaccccaccatgcagcggcgcacgatggcgacgttccgccgtatgactggggacaatcccgatgcaccacgctggttaagttatcccggattcgttcctcagttaggaaataacgcagacagtgtaatctttattaatcagttacaaggattatggccagttgagcgttatctcagtctactcactggcgagctgccgcgtttacgcgatgatagcgatggctacggtccccgcgggcgagattttatcgttcacgttgattttccggcagaagtcatccatgcatggcaaacgctgaaacatgatgcggtgctcatcgaggcgatggaaagtcgcagcttacgttaaaaattgcccgtttgtgaaccacttgtttgcaaacgggcatgactcctgacttttatttctgccttttattccttttacacttgtttttatgaagcccttcacagaattgtcctttcacgattccgtctctctgatgattgatgttaattaacaatgtattcaccgaaaacaaacatataaatcacaggagtcgcccatgagtgtacccgttcaacatcctatgtatatcgatggacagtttgttacctggcgtggagacgcatggattgatgtggtaaaccctgctacagaggctgtcatttcccgcatacccgatggtcaggccgaggatgcccgtaaggcaatcgatgcagcagaacgtgcacaaccagaatgggaagcgttgcctgctattgaacgcgccagttggttgcgcaaaatctccgccgggatccgcgaacgcgccagtgaaatcagtgcgctgattgttgaagaagggggcaagatccagcagctggctgaagtcgaagtggcttttactgccgactatatcgattacatggcggagtgggcacggcgttacgagggcgagattattcaaagcgatcgtccaggagaaaatattcttttgtttaaacgtgcgcttggtgtgactaccggcattctgccgtggaacttcccgttcttcctcattgcccgcaaaatggctcccgctcttttgaccggtaataccatcgtcattaaacctagtgaatttacgccaaacaatgcgattgcattcgccaaaatcgtcgatgaaataggccttccgcgcggcgtgtttaaccttgtactggggcgtggtgaaaccgttgggcaagaactggcgggtaacccaaaggtcgcaatggtcagtatgacaggcagcgtctctgcaggtgagaagatcatggcgactgcggcgaaaaacatcaccaaagtgtgtctggaattggggggtaaagcaccagctatcgtaatggacgatgccgatcttgaactggcagtcaaagccatcgttgatagtcgcgtcattaatagtgggcaagtgtgtaactgtgcagaacgtgtttatgtacagaaaggcatttatgatcagttcgtcaatcggctgggtgaagcgatgcaggcggttcaatttggtaaccccgctgaacgcaacgacattgcgatggggccgttgattaacgccgcggcgctggaaagggtcgagcaaaaagtggcgcgcgcagtagaagaaggggcgagagtggcgttcggtggcaaagcggtagaggggaaaggatattattatccgccgacattgctgctggatgttcgccaggaaatgagcattatgcatgaggaaacctttggcccggtgctgccagttgtcgcatttgacacgctggaagatgctatcagtatggctaatgacagtgattacggcctgaccagtagtatctatacccaaaatctgaacgtcgcgatgaaagccattaaagggctgaagtttggtgaaacttacatcaaccgtgaaaacttcgaagctatgcaaggcttccacgccggatggcgtaaatccggtattggcggcgcagatggtaaacatggcttgcatgaatatctgcagacccaggtggtttatttacagtcttaatgagtgaaagaggcggaggttttttcctccgcctgtgcgcgtcagagtttagcgaatttttcgagggtgcgaataagctgtgtgacgaagccatattcgttatcgtaccaggcgaccgttttcaccagttgtaaatcgcccacggcggtaatttccgtttgcgtggcatcaaacaccgaaccgaaatggctgccaatgatatcggaagagactatttcttcatcggtataaccaaatgactcgttattggtggttgcttgtttaagtgcgttattcacctcttcggcagtcacttttttccgagaatcgataccagttcagtgaccgaacctgttttcaccggcacgcgttgcgcatgacctttcagtttgccgctcagttccgggatcaccagaccaatggcttttgccgcccccgtagtgtggggaatgatattttctgccgctgcgcgtgaagcacgtaaatctttaccacgcgggccatccaccagtgactgggtgccagtataggcatgaatggtcgtcatcgtgccgacttctatcccgaaactgtcatgcaaggctttggccatcggcgcaagacagttagtggtgcatgacgccacggaaacaatggtgtcgttgccatccagagtgtcgtcattgacgttataaacgatagttttcatttcaccggcaggggcggaaatcaacaccttcttcgcaccagcatcaagatgcgcctgcgatttctcggcggaggtataaaagccagtacattcgacaatgatttctgcacctttcgctttccacggaatatttttagcctctttttcggcgtaaaccgcgatacttttcccatcaacgataagtgaatcttccgtaaaatcaacgctccaggggaatggtccgtagtttgaatcatgtttcagcaggtaggcgagaatttatggggaagtgagatcattaatagcgacaacgtctatgttgcttttgacttcaagtaatcgacccaacaccagtcgaccgatacgaccaaaaccgttaataccaactttactcatggttttctcctgtcaggaacgttcggatgaaaattgatcctttccaagcttagaccaggatggcgggatgggcaatctccattctcacagtgaaacgtaacgtactgaaaacgggtgaacaatatttaatgaaattttgagaaaagcccgttatgttaacggaaaattatgttaaagcaggaaatgttatggaaaataaatatagtaggttacaaatcagcattcactggctggtctttttactggttatcgcagcgtattgcgcaatggagtttcgtggtttcttcccacgtagcgatcggccactcatcaacatgattcatgtttcctgtggcatcagtattctcgtgctgatggtcgttcgtcttttgttaaggctgaaatacccaaccccgccgattatacctaagccaaaaccgatgatgacgggactggcgcatttgggacatttggtgatttatctcctgtttattgcgctgccagtgattggtttggtgatgatgtataaccggggcaacccgtggtttgcgtttggtttgacgatgccttacgctagtgaggccaatttcgaacgggtagatagcttaaagagctggcatgaaacgctggcgaatctgggatattttgtcatcgggttgcacgctgcggctgcactggcacaccactatttctggaaggacaacacacttctacgcatgatgccgcgtaaacgttcctgaaggatatttaaagaaaacgcctgtactaaaaccgacccgtggtacaggcgaagaatacgggtctacatcggaagcgcctattatatttatttgtatgataaataaaaccataatccttgcccatacgtccatctggcttatttttaatcaattcacccgatctttgatctcatcaacggtatcaaaataaaccagcgtataacgttcaaatcgaacataagattcgataaaccatggaggttatatgaaaaaactggcacttattttgtttatgggaacgcttgtttccttttatgccgatgccgggcgcaaaccctgttctggtagcaaaggggggatcagtcactgtacggcaggcggcaaatttgtctgtaatgatggttctattagtgcaagcaaaaaaacatgcactaactgaagtgtaaaaggggtgccatgagaaaatgaatctgctagtcaaatgcgcggggaaaatccccgcgcttgcccttacctggacgtgcaggccatgagcgcagcaacctccttatcaccgtcccggaaccgcagttcgtagagcgtttgtcgggtcaggagtgtgaatgtcagaatcgtaatgcagataatgagcagacacaccaccagagggttgtgcttcatagcctttctccttgccggatggcgggtaagaggctaagatctgaattgctaggttcattcgttggcctcggttgatagaaatatcggtcggggccttcgtctttctgattcccggttagcctgaaaacagaaagtctcaggcacccgcaggcatcctatgaggtttccttagggacgaaaataatcacttcacgaaattgcgtgctgttttccagaatttttcgtcattcgggttagccagtttagccattcgttactctcttcattccaatagcattaattttctatgcaataattgttgtaaaaatgtgacgcaaagaggtttttggtcataagtaattaccgtcaagtgccgatgactttctatcaggagtaaacctggacgagagacaacggtaatgaatacaactcccagtcagcgattaggttttttgcatcacatcaggttggttccgttatttgcctgcattctaggcggtatcttagttctattcgcattaagtagtgccctggctggctatttcctctggcaggccgatcgcgatcagcgtgatgttactgcggagattgagattcggaccgggttagcgaacagtagtgattttttgcgtagtgcccggatcaatatgattcaggccggggctgcgagtcgtattgcggaaatggaagcaatgaagcgaaatattgcgcaagccgaaagcgagattaaacagagccagcaaggttatcgtgcttatcagaatcgaccggtgaaaacacctgctgatgaagccctcgacactgaattaaatcaacgctttcaggcttatatcacgggtatgcaacctatgttgaaatatgccaaaaatggcatgtttgaagcgattatcaatcatgaaagtgagcagatccgaccgctggataatgcttataccgatattttgaacaaagccgttaagatacgtagcaccagagccaaccaactggcggaactggcccatcagcgcacccgcctgggtgggatgttcatgattggcgcgtttgtgcttgccctggtcatgacgctgataacatttatggtgctacgtcggatcgtcattcgtccactgcaacatgccgcacaacggattgaaaaaatcgccagtggcgatctgacgatgaatgatgaaccggcgggtcgtaatgaaatcggtcgcttaagtcgtcatttacagcaaatgcagcatagtctggggatgacagtagggactgttcgacagggcgcggaagagatttatcgtggcaccagcgaaattagtgctggcaatgcggacctgagttctcgcaccgaagaacaagcggcggctatcgaacaaactgccgccagcatggagcaactcactgcgacggtgaaacagaatgcggataacgcgcatcatgccagcaaactggcgcaagaggcttctattaaagccagcgatggcgggcagacggtttccggtgtagtaaaaacgatgggcgctatctccacgagtagcaagaaaatttctgagatcaccgccgtcatcaacagtattgctttccagacgaatattctggcactgaatgctgccgttgaagccgcgcgagcgggtgagcaagggcgtggatttgccgttgtcgccagcgaagtacggacactcgcaagtcgcagcgctcaggcggcgaaagagattgaaggcttgatcagtgaaagtgtcaggttaattgacctggggagcgatgaggtggcaacggccgggaaaaccatgagcactattgttgatgccgtcgcgagtgtcacacatatcatgcaggaaatcgccgccgccagcgatgaacaaagtagaggcataacgcaggttagccaggcgatttctgaaatggataaggtgacgcaacagaatgcttctctggtagaagaggccagtgcggcggcggtgtcccttgaagaacaggcggcacgattaactgaggcggtggatgtattccgtctgcacaaacattctgtgagcgcagaacctcgcggagcgggtgaaccagttagtttcgctacggtgtgaaaatgttcaaggagggatcgacagatcccttcacctttcagaacggcatactttttcgaatagcgttaatcatcaactggcaaccagaagagaacgtcgcatctacgcgggtcagtattccaatcggttcgcctgcaccatgtcccggaacaggcagggccaccagcgtggcatgacgcaggtcgtcttttacagcgccagaagggacaaaccacacgtaatcgtattcaaccgtaagttgacgagataggctagcagacagcgtttcgatacaaccgctaggaattttacagccctggctctgcactaatgcatcactatgctggcgtggcgcagtgccttctggacttacaacgaccggccattccagcacccggcttagcgttacgttctcctgaagtagcgggtgattagggcggacaaccagcttcaagctttcaagaaacagcagttcgtaattaagcccggtcatcagttcaggatcactcatccgaccaatgccgatatcgatttccccggtttttaaacccgccagaatcatagggttactcattgtcgcaacttgcaaggtcgtctctttttgttgctgatgaaactgacctataacgctaggtaatatccccagtgccgcagtaggtagtgcaccaaccctgacgacatcattattaagaccttctttacgatgaaggctccgtccggcagtgttgatggcgtcaagaactctgactgcatgcgttaaaaattgttcgccgggtaaggtaagttgcgccccctgacgaccacgctcaaacaagcgagcgccagtcagctgctccagttcattcaatgtcttagagagcgcaggttgactcaaattaagggtttcagccgcgcgccccaaagttccttgttgtgcgacagctacgaatgtatgaaggtggcgcaaacggatgcgctgactaaacagactatttttttccataagcgatgttaaaaacgaagcggtgtcgctgacaagtgaagttgtttgattatgataacttgattgcaaaatattattaacaattaaagcaattatgttacagcaaaatggataatattgatgttttcgcggcgagatcacagtttgtaaattcttcccgcaagagtgaatgcggttacctacactccagattactgaccactggaggcagacactatggcgaacagcatcacggcggatgagattcgggaacagtttagccaggcaatgagtgccatgtaccagcaagaagttccgcaatatggcacgctgctggaactggtagctgatgtgaatctggctgtgctggaaaacaatcctcaactgcacgaaaaaatggtaaatgcagacgagctggcgcgactgaatgttgaacgtcatggggcgattcgcgttgggactgcacaagagcttgctactcttcggcggatgtttgccattatggggatgtacccggtgagctattacgatctcagccaggcaggggtgccggtacatagcacagcatttcggcccattgatgatgcttctctggcgcgtaatcccttccgcgtttttacctccttactccgccttgagcttatcgagaacgaaattttgcgccagaaagcggcggagattctgcgtcagcgcgatatcttcaccccacgttgtcgacaactgttagaggaatatgagcagcagggcggttttaacgaaacacaggcacaggagtttgtgcaggaagccctggaaacgtttcgctggcaccagagtgcaacggtagatgaagaaacctatcgcgcattgcacaacgaacatcggttgattgctgatgtggtctgttttcctggatgccatatcaaccacctgacgccacgtacgctggatattgaccgggtgcagagcatgatgcctgaatgcggaattgaacccaaaattctcatcgaggggccgccgcgccgcgaggtaccgattttactacgccagaccagctttaaagcactggaagagacggtgttgtttgcggggcagaaacagggcacgcataccgcgcgctttggtgaaattgagcagcgtggcgtggcattaacgccgaaagggcgacaactgtatgatgatcttctgcgtaacgctggaaccgggcaggataatctcactcaccaaatgcatttacaggaaaccttccgcacttttcctgacagtgagtttttaatgcgtcagcaagggttggcatggttccggtaccgtctgacgcctagcggtgaggcgcatcgtcaggcgattcatcctggagacgatccacagcccttaattgaacgtggttgggtagtggcgcaacccatcacctatgaagatttcttgcccgttagcgcggcggggatcttccagagtaatctgggtaatgaaacgcagacacgcagtcacggtaatgccagtcgcgaagcatttgagcaggcgttgggttgtccggttttggatgagttccagctttaccaggaagcggaagaacgcagtaaacgtcgctgtggtttgctttaaaatctgaccatccgcctttgcaaaaatttgcctgattttacaaacgaatcaggctcatcccatcgacataaaaaaaatgccgatttatgcatattctctcagttcaacaattggattattaataaatattgtctagagtgagcggtcataaataagcactttcttgccgctgaaaacgaccagcgcgggaccattcacaacaccagaaggactcactttcaggtatggatcgtagacgatttattaaaggttcaatggctatggccgccgtgtgcggtaccagcggcattgcttctcttttttctcaggcggcattcgcggcagattctgatattgccgacgggcaaacccagcgttttgacttctccattctacagagtatggcgcacgacttagcgcaaacagcgtggcgtggtgcgcctcgtccgttacctgacacgctggcgacaatgacgccgcaggcttataacagtattcaatacgacgccgaaaaaagcctctggcataacgttgagaaccgtcaactggacgctcagttcttccatatgggaatgggattccgtcgccgcgttcgtatgttttctgtagatccagcaacacatctggcgcgtgaaattcactttcgcccggagttgttcaaatacaacgatgcaggtgttgatacaaaacaattagaagggcaaagcgatctcggctttgccggttttcgcgtgtttaaagcccccgaactggcgcgccgtgatgtagtaagttttctcggcgcgagttatttccgcgccgttgatgatacatatcaatacggtttgagcgcccgcggcctggcgatcgacacttacaccgacagtaaagaagagttccccgactttaccgccttctggtttgatacggtaaaaccgggggcaactacctttaccgtttatgcgttgctcgatagcgccagcattactggtgcctataagttcactatccattgtgagaaaagtcaggtgattatggatgtggaaaatcacctgtatgcgcgcaaagacattaaacagctgggcattgcgccgatgaccagtatgttcagctgcggtactaatgaacgtcggatgtgcgatacaattcatccgcaaattcatgactctgatcgtctgtccatgtggcggggcaacggcgagtggatttgccgtccgctgaataatccgcaaaaattgcagttcaatgcttacaccgacaacaacccgaaagggtttggtttattgcaactggatcgtgacttctcccattatcaggacattatgggctggtataacaaacgcccaagtctgtgggtggaaccgcgtaacaagtggggtaagggcaccatcggcctgatggaaatcccaacaacgggcgaaacgctggataacattgtctgcttctggcagccagaaaaagctgtaaaagcaggtgatgagtttgcattccagtatcgtctgtactggagtgcgcaaccgcctgttcattgcccattagcgcgcgttatggcgacgcgtaccggcatgggcggtttcagcgaaggttgggcgccaggtgaacactatcccgaaaaatgggcgcgtcgttttgccgtcgatttcgttggtggtgatctgaaagctgccgcgccaaaaggcattgagccggtgattacgctttccagtggggaagcgaagcaaatcgaaattctctatattgaacccatcgatggttatcgtattcagtttgactggtatccgactagcgactccactgatccggtcgatatgcggatgtatctacgttgtcagggggacgctatcagtgaaacatggctgtatcagtatttcccgccagcgccggataaacgtcagtatgttgacgaccgcgtgatgagttaatcgttttttcttcggcaccttcttcgggaggtgccgtctggttaaacacgatcccgctcgcatttttccctaagttaaatgagtaatctgatggtgtgtatttcagatacaccttgtcagccactaacagggagtgcgtatgtttccagaataccgagatttaatatcccgtctgaaaaacgaaaatcctcgctttatgtccttgttcgataaacacaataaacttgatcatgaaattgccagaaaggaaggttccgacggtcgagggtacaatgcggaagtggtccgcatgaaaaaacaaaagctacagttaaaagatgagatgctcaaaatcctgcagcaggagagcgtcaaagaggtgtaaactttcctaagccgccagccaggcggcttttttaacaactgcatggattgactggagataagatgactgaaacgataaaagtaagcgaaagtcttgaattacatgctgttgcagaaaatcacgtcaaacctctttatcagttaatctgtaaaaataaaacctggttacagcagagcctaaactggccgcagtttgttcaaagtgaagaggacacgcgaaaaacggtgcagggtaatgtgatgttgcatcaacgcggctatgccaaaatgttcatgattttcaaagaagatgaacttatcggcgttatcagctttaatcgtattgaaccactgaataaaaccgctgaaataggctactggctggacgaatctcatcaggggcaggggatcatttctcaggcgctgcaggcattgattcatcattacgcccagtctggtgaacttagacgcttcgtgatcaaatgtcgggtggacaatccgcaaagcaaccaggtcgctttgcgcaatggttttatccttgaaggttgcctgaaacaggctgagttcctgaatgatgcctatgatgatgtgaacttatacgcgcgtattatcgatagtcaataatcacaataaccctgccagcggcgttcgcgtaatgcgctcctcgccgttaatgacttttggaccacggacatgaaccgtgtcgccatcaaaggcttcaacgacggcgtggtcggttaactccacatggttttcaattatcaccgcacctgtaatacggctctcaccttgtatgacaacgtgctcgtcgagcagaatcggtccgccacgtaccacggcatttccgccaaccaagacatgatgttttaacacacaattaccttccacaatggcatattccgccacctggctactgtaatgaatcgtcggaatggcatcttcttctatgccagctttcacctgcgcgtgaccgtagactttagcgcaatcgcatagccagacattgttctcttcattaccttcaatactggcaaaatcaaaaacttcggcgcgatgttcaataaaagcataccggacgacggcatcgccataaatttgtgcctggtggacaatacggctggcgctaacccttgcgcgatcataaatttggagcaggagttgatggtcgggcgttaagccttgtgcggcgacgatcatagaatgttgatcaattaaggcgtgaccaaatattctacattgcccgtaaactaaactgtcatgaatggtgacgctgtcacttatatatgcaccctggctgatttcactattatcgatccagacgttatccgttgcgtaaacctctccccacagcacgctggtgccggtgatacgcgtattaccggaaatcaccgctccgccgaacgcaatagcattctggtcgtaaatccagcaatttccttcttgtgctaacaccgtttcgcgatcgatccagccgccagcggttcctgctatcacatcgttaaaatcgctaatggcgataatctgccgtaataacacattttttttagtgccatcttcctgataactaaaggctcgctgttcttcacttagacgatatttgcgcatagcgttttcccacaggtgacttactataaccgtagcaaattctgcggctctggctatgctcgagaaaattccataaaatgcatttcaaatatactttataaattaaacaaaatgagtaagaagatgcagagcgataaagtgctcaatttgccggcaggctactttggtattgtgttggggacgatagggatgggatttgcctggcgctatgccagccaggtttggcaggtcagccactggttaggggatgggctggtgattctggcgatgatcatctggggattattgactagcgcatttattgcccgactcatacgctttccgcatagcgtgctggcggaagttcgccatccagtgctgagcagttttgtgagtttgtttccggcaacgacgatgctggtggcgattggttttgttccgtggtttcgcccactggcggtgtgcctgttcagttttggtgtcgtggttcagttggcttatgccgcctggcaaactgcgggattatggcgcggatctcaccctgaagaagctaccacgcctggactgtatctgccgacagttgccaacaactttatcagcgcaatggcctgtggtgcgttgggctacaccgacgccggtctggtgtttttaggcgcaggcgttttcagttggctaagccttgaaccggtgatcttgcagcgtctgcgcagtagcggagaattacccacggcactgcggacaagtctcggcattcagctcgctcctgcgctggtggcttgtagtgcctggctgagcgtcaacggcggcgagggtgacacgctggcgaaaatgcttttcggttatggactgctgcaactgctgtttatgctacgtctgatgccatggtatctctcccagccatttaatgctagtttctggagtttcagcttcggcgtatctgcactggcaaccaccggtttgcatctggggagtggcagcgataatggatttttccatacgctggcggtgccgctgtttatctttaccaattttattattgcaatactgctcatccgtacttttgcgcttctgatgcagggaaaattgttagtcagaaccgagcgcgccgttttaatgaaagcagaggacaaagaatgatcattcgtgacgaaaactattttactgataaatatgaattaacccgcacacactctgaagtactggaagcggtgaaagtggttaaaccgggtaaaacgctggatctgggctgtggcaatggtcgtaacagtctttacctggcagccaatggttatgatgttgacgcatgggataaaaatgccatgagtatcgccaacgtcgagcgcattaaatccattgaaaatctggataatttacacacccgagtcgttgatctgaataacctcacatttgatagacagtacgattttattcttagcactgtggtgctgatgttccttgaggctaaaaccatccccgggttgattgccaatatgcaacgttgcactaaacctggtggttacaacctgattgtggcggcgatggataccgctgattatccatgtaccgtcggcttcccgtttgccttcaaagagggagaattacgtcgatattacgaaggctgggagagggtgaaatacaatgaagacgtcggcgagctgcaccgcaccgacgccaacggtaatcgtattaaactgcgtttcgccacgatgctggcacgtaaaaaatgacccggtaagcacaaaacgcgtgaaaattccccacgctgagatgatttactgttcttcttttcggtaagcatattttttatcgaagggatgtgaaattaatcacagtagtcgaagtttttagcagcttaacttactgaaatttaagtactgatgattgacttagcccctttttcggcattgactatgtcgtctgaaaaggggctgaaaaatttattttcaccaacactttttttgccacaacacgaagcggcgctttttgctataacttagaaagtaatataatcatctcaggaaactattcatgcgtaccacaagttttgcgaaagttgcagctttatgcggcttattggctctgtctggttgtgcatctaaaatcacccagccagataaatattctggttttttaaacaattactctgatttaaaagaaacaaccagcgctacaggtaaacctgttttacgttgggtagacccgagttttgatcaaagcaaatatgacagcatcgtctggaacccaatcacttattatccggtaccgaaaccgagcacccaggtagggcagaaagttctggataaaattttgaactataccaacaccgaaatgaaagaagcgatagcgcagcgtaaaccactggttaccaccgctgggccgcgtagtctgattttccgtggggccattaccggtgtagataccagcaaagaagggctgcaattctatgaagtggttcctgttgcattagtggttgcggggacgcaaatggctacaggccaccgtaccatggatactcgcctctattttgaaggtgagctgattgatgcagcgactaataaaccggttatcaaagtcgttcgtcagggcgaaggtaaagacctgaataacgaaagtacgccaatggctttcgaaaatattaaacaagttattgatgacatggcgaccgatgccaccatgtttgacgttaacaaaaagtaattccagacgcgccatcgttagatggcgctttttatccggtgcgccgtaaaaccccatccttcagggcggggatataaggcgcggttttccacctgaccaggtgtttgctgttgttcaatgtattggcggatgacggatattggcgcacctccgcagctactggcaaaatagccaggactccacaaaacgcctttgtagtaatacctgaatgcaatatctggtcgatctcgtcgcagtcacctacccgatacgcctttgaggctgtttaccagactggatatcgccagtttgggaggatagttaattaacaaatggacgtgatctggttcgccatccatttcaaccagttcagcttcaaaatcagcacatacatttgaaaagtaagtgcgtagtttttctgtcgcgtcatggtcaaaaatctggcgtcggtatctggtgacaaagagcaggtgaacatgcatcaggaaaacacaatgccttccacgccggatatcggtttcttttttcacagaccaaagtatcatttgacctgtgaaacgattacaggcatttaaattccagttaagacccggtggtcaacaggagtgtgaaatgaggcgcttcgcaggcgcatgtcgtttcgttttcaatcgtgctctggcacgtcagaatgagaatcatgaggccggtaataaatacatcccttacgggaaaatggcttcctggctggttgagtggaaaaatgccactgaaacgcaatggcttaaagattctcccagtcagccattgcaacagagtctgaaagaccttgagcgggcttacaaaaacttcttccggaagcgggctgcttttccccgattcaaaaagcggggacagaatgatgcattccgctacccgcagggcgttaagctcgatcaggaaaacagccgtatttttctgccgaaactgggctggatgcgctaccggaacagccgtcaggtcacgggtgttgtgaaaaatgtcactgtcagccagtcctgcggtaagtggtacatcagtattcagacagaaagtgaagtaagtactccggttcaccctagtgcaagtatggtcgggctggatgctggcgtggctaaactcgccacgctgagtgatggcacagtctttgagcctgtaaacagttttcagaaaaaccagaagaagctggcgagacttcagcgacagttaagccgcaaggtcaaattcagcaacaactggcaaaagcagaaacgcaaaatacagcgactgcattcctgtatcgcaaatatccgcagggactaccttcacaaagtcacaacggccgtcagcaaaaaccacgcaatgatagtcattgaggatttgaaggtcagcaacatgagtaagagtgcagcgggtacggtcagccagccggggcgcaatgtccgggcaaaaagtggtttaaaccgtagcatactggatcagggctggtatgaaatgcgccgccagcttgcgtataagcagctctggcgtggcggtcaggtgcttgctgttccgccagcgtatacaagccagcgttgcgcgtactgtggtcatacagcgaaagagaaccgcctgagtcaaagtaaattcagatgccaggtatgtggatatacagcgaacgccgatgtaaatggcgctcgcaacattttagcggcggggcacgccgttcttgcctgtggagagatggtgcagagtggccgcccgttgaagcaggaacccaccgaaatgattcaggcgacagcctgaacgtagcagggatccacgtccttcagggcgtggaggatgtcaatatcggtttctgtcagcgattaaattcaacaccacgtaacaaacgcctccggcaattaatccccaaaacgcagaaccaatcccgaccagcgtcaatccacttgccgttaccagaaatgccaccaccgccgcgtctcgctcacgctcattatgcagcgcctgatacaaactgccgccgatggtacttaacagcgccagacctgccagcatctggatccaacttacgggcagggcagccatcatcccggtaatggcactaccaaacagacctgcgagcaaatagaaaatgcctgcaacggcagcggccagccaacgttgatctttatccggatgcgcttccgggctttggcaaatagccgcggtgattgccgcaataccgacggaataaacgccgaaaggggaaaaaaccagtgccagcaatccagtaaatacaattaatgggctaacaggagcgctatatccagctgctttcattgctgcgatacccggtgcgttttggcttgccatcgtcaccagaaaaagggggagtgcaacgctcaggctgtgagcaaagctaaaatcaggggtaatataagtggggagaacgggtttaaagacaacatcagttgtgacaacgtcaccttgcgcgatgacgatcacgatcccaataatcatcgcggcaattaccgcatagcgcggcgcaacggccttggttgccagccataccagcaacatacttccacacaacgtaaattgaccgtccagactggcaaacgcctgtaaaccaaagcgtaataaaatcccggcaagcattgccgccgcaaggctgtgcggaataatgcgcatcagacgagcaaagagtcccgttatgccgcagaggactattagcgcgttggtgacaataaaaacgccgatggcttcgttaagtgttagtccctgcaatccggtgaccaacaaagccgcgccaggcgtactccatgcggtgagaacaggtacgcgataccataatgtcagagtcagcgtactgacgcccattgccagccccagcgccgtcatccagccagagatttgtgcagtggtggctccggcgacaatcgctgcttgccagattattgccgcactactggcgtagccaattaataccgccagaaaccccgccagtagcgtgggtggaggaatagaaaacagacgcatagtcacctcgtgcgttatagcgtacaggcaccgtagcatttgtccgttataacgcacaagtgataaacttccgttttgccggaggagtcgcatggaaaatctcgctcgctttttatccaccacacttaaacaactacgccagcagcgcggctggagtcttagccgactggcagaagcgacgggcgtttctaaagcaatgttagggcagattgagcgtaatgagtccagtccgacggtcgcgacattatggaaaattgccaccgggttgaacgtaccatttagtacatttatttctccgccgcagtccgctacgcctagtgtttatgatccacaacagcaggcgatggtgatcactagcctgtttccttatgatccacaactctgctttgaacacttcagcattcagatggcatctggtgcaataagcgaaagcacgccccatgagaagggggtaatcgaacatgtcgtcgtcattgatggacaacttgatctgtgcgttgatggggaatggcagacccttaattgtggggaaggcgttcgatttgctgcagacgtcacgcatatctatcgtaatggtggggagcaaaccgtacattttcattccctcatccattacccgcgcagttaagcgggaaaactatttcgcaacgtcgcgcttgtggctaaaatagccgccatttttcagctactggataagaatgtgaccgtatcttctcatcgacttgaactgttaagcccggcacgcgatgccgccattgcccgcgaagctattttgcacggtgccgatgctgtttatatcggcggccctggttttggtgcccgtcataatgccagtaatagcttgaaagatattgccgagctggtgccgtttgcccatcgttatggtgcaaaaattttcgtcacgcttaacaccattttgcatgatgatgagctggaacccgcgcaacggctgattactgacctctaccagaccggtgtcgatgcgctgattgttcaggatatggggattctggaacttgatattccgccgattgaactgcacgccagtacgcagtgcgacattcgtacagttgaaaaagcgaagttcctctctgatgttggcttcacgcagattgtgctggcgcgagagctgaatcttgatcagatccgcgcgattcaccaggctacggacgcgaccattgaattctttattcatggggcactgtgcgtggcctatagcggtcagtgctacatttctcatgcgcaaacagggcgtagcgccaaccgtggcgattgcagccaggcgtgccgtttgccatacacattgaaagacgatcaggggcgggtggtttcctatgaaaaacatctgctgagcatgaaagataacgatcagactgccaacctcggcgcgctgattgatgctggtgtacgctccttcaagattgaagggcgttacaaagatatgagctacgtgaagaatatcaccgcccattatcgccagatgcttgatgccattattgaagaacgtggcgatctggcgcgcgctagtagtggtcgtactgaacatttctttgttccaagcacggaaaagactttccaccgtggtagcacagattattttgtgaatgcccgtaaaggcgatattggcgcgttcgatagcccgaaatttatcggcctgccggtaggcgaagtagtgaaagtggcgaaagatcatctcgatgttgccgttaccgagccactggcaaatggcgatggcctgaacgtgttgattaaacgtgaagtcgtcggttttcgtgccaatacggtcgagaaaaccggagaaaatcagtaccgcgtctggcccaatgaaatgccagcagatttgcacaaaattcgtccacatcacccactaaaccgtaatcttgatcataactggcagcaggcactgacaaaaacctccagcgaacgtcgggtggcggtagacattgaactgggcggctggcaggaacaactgattctgaccctcaccagtgaagagggtgtcagcatcacgcatacgctggacgggcagttcgacgaagccaataacgccgaaaaagcaatgaacaatctgaaggatggtctggcaaaactggggcaaaccctctattacgcccgcgatgtgcaaattaatttgccgggggcgctgtttgtaccaaacagtctgttaaaccagttccgccgtgaagctgctgacatgctggatgctgcgcgtcttgccagttaccagcgcggcagccgtaaaccggttgctgatcctgcgccggtttatccgcaaacgcatctgagtttcctcgcgaacgtatacaaccagaaagcgcgtgaattttatcatcgctatggtgtgcagctgattgacgcggcgtatgaagcacatgaagagaagggcgaagtcccggtgatgatcaccaagcattgtctgcgctttgcctttaatctgtgcccgaaacaggcgaaaggcaatatcaaaagctggaaggcgacgccaatgcaactggttaacggcgatgaagtattaacgctaaagtttgattgccgcccatgcgagatgcacgtcattggcaaaatcaaaaatcacatactgaaaatgccgttaccgggaagcgtagtggcatccgtaagtccggatgagctgctgaaaacattgccgaagcgaaaagggtaaaacgccagttttctggttactcacaacttattgaatctgcatgatattgcctgccgggtaaggcgttacgccgcatccggcatcaaatgactcaacgttgtcccgcttctggtttgcggcttttttgccagtaaaaatgctcgcgcaaaccttccgcgctctcttccgccacagcacgcaattcatcgctgtccgcttcatgacgcagctgatgatccacattctttacccacacaaattcatgtcctttgtgccctgccatgagttgtccactaaacagagcacacgttaataagacaacgcttaacgccttcgtaaacatcctgccacctttttcttaccttttgccgctatgatgccgatcgtttcttgaggttattattcagttttgcaaattagcgcaaagaaattctggaatcttccttcctgattttgcattgcattctgccgttgcggcgatttagtgctattttcgagcaaattacacacggaggtaaacactaatgtttactttgttgatatactcagcggcagggaggcgatgtgaaacaaagcgagttcagacgttggctcgaatctcagggcgtcgatgtagcgaatggcagcaaccatttgaaactcaggtttcatgggaggcgcagtgtcatgccgcgtcacccctgcgatgagattaaagaaccattgcgtaaagcaatcctgaaacaactcggtttgagttaatcgccaattaaaaaggttaatgacatgcgagagacagtcgaaattatgcgttatcccgtcactcttacacccgcgccggaaggcggttatatggtttcttttgtggatatccctgaagcgttgacccagggcgaaactgtcgctgaagcgatggaagcggcaaaagatgctttactgaccgcatttgatttttattttgaagataacgagcttatccctttacctagcccattaaatagtcacgatcactttattgaagtacctttgagcgtcgcctctaaggtattgctgttaaatgcttttttacagagtgaaatcactcagcaagagttagccaggcgaattggcaaacctaaacaggagattactcgcctatttaacttgcatcatgcgacaaaaatcgacgccgtccagctcgcggcaaaggcgcttggcaaagagttaagcctggtgatggtttaattacagttaacgaaaagttgtcatttttaacaactgatatagactgccgaatcatctgcacataattacgattcgataatgaaaaaataccagcagcttgcagaacaattacgcgagcagattgcgagcggtatctggcaacccggcgatcgtttgcctagcttgcgtgaccaggtggcgcttagtggcatgagctttatgactgtcagccatgcctatcagttgctcgaaagtcagggatatattatcgcacgaccgcagagcggttattacgttgcgccacaggcaataaaaatgccgaaagcgccagtcattccagtcactcgagatgaagcagtcgatatcaacacttatatttttgatatgttgcaggccagtcgcgatccgagcgtcgttccgtttgccagcgcctttcccgacccgcgacttttccccctccaacaactaaaccgcagcctggcgcaggtaagcaaaaccgccacagcgatgagcgtgattgaaaacttaccgccaggaaacgcagaactgcgtcaggctattgctcgtcgctatgccttacagggcatcaccatttctcctgatgaaattgtcattactgccggggcgttagaggcattaaacctcagtttgcaagcggtaactgaaccgggcgattgggtgatagtagagaatccttgtttctacggtgcgttgcaggcgctggagcggctacggctgaaggcgttaagcgtggcgacggatgttaaagaagggatagatcttcaggcgctggaactggcgttgcaggagtatccggtgaaagcgtgctggctgatgactaatagccagaatccactcggatttaccttaacgccgcaaaaaaaagcacaactggtggcgttgctcaatcagtacaacgtaacgctgattgaagatgacgtttacagcgaactttattttggacgggaaaaaccgctgcctgcgaaagcgtgggatcgccacgatggcgttttgcattgctctagctttagcaaatgtctggtgcctggttttcgtattggttgggtcgccgccggaaaacatgcacgtaaaattcaacgcttgcagttgatgagtacgctttccaccagcagtccgatgcaacttgcgctggtggattacctttccacgcgccgatacgacgcccatcttcgtcgcctgcgtcgccagcttgcggaacgtaaacaacgtgcctggcaggcactgctgcgttatctgcctgcggaagtgaaaattcatcataatgacagtggttactttctctggttggagctccccgagccgttagatgccggcgaattaagcctggcggcactgacgcatcatatcagtattgcgccgggtaaaatgttttctaccggtgaaaactggagtcgttttttccgttttaataccgcgtggcagtggggagagcgtgaagaacaggcggtaaaacaattaggcaaacttattcaagaacggctgtaatagcgtttaatttaattcctcttagattgggtaatatgaatttcgaatagcagtcatatttcctaactccttgactatactccagaagataaccttacagacggcataatgcgcggtagctcacaacctgaataaattttctcaggggcgaaggtgtgcctgcaagccgccgtctatggttaaacaaggagatatttttacggcacggcggctgaacaattaattacgacaggagtaagaccttatgagcaagacatttgcccgcagcagcctgtgtgcgctcagcatgacaataatgaccgctcacgccgccgaaccgcctaccaatttagataaaccggaagggcgactggatattatcgcctggccgggatacatcgaacgcggacaaactgataaacaatacgactgggtaacgcagttcgaaaaagagacaggctgcgcggtgaatgtgaaaaccgccgcgacttccgatgaaatggtcagtctgatgaccaaagggggttacgatctggttacggcatccggcgatgccagcctgcgtttgattatgggtaaacgcgtgcagccgattaataccgcattgattcccaactggaaaacgctcgatccgcgcgtggttaaaggcgactggtttaatgttggcggcaaagtttacggcacaccttaccaatgggggccgaacctgctgatgtacaacactaaaaccttcccgacgccgccggatagctggcaagtggtttttgttgagcaaaatctgccggacggcaagagcaataaaggccgcgttcaggcttatgatggccctatctatattgcggacgctgcgttgttcgttaaagccactcagccgcagttgggcatcagcgatccgtatcaactcaccgaagaacagtaccaggcggtgctgaaagtgctgcgcgctcaacacagtttgatccatcgctactggcatgacactaccgtgcaaatgagcgatttcaaaaacgagggtgtggttgcttccagtgcctggccctatcaggccaacgccctgaaagccgaaggccagcctgttgctaccgttttcccgaaggagggtgttaccggttgggctgataccaccatgctgcatagcgaagcgaaacatccggtttgcgcctacaaatggatgaactggagtttaacgccaaaagtgcagggcgatgtggcggcctggtttggcagcttaccggtagtgccggaagggtgtaaagccagtccgttattaggcgaaaaaggttgtgaaaccaacggttttaactatttcgacaaaatcgccttctggaaaacgcctatagcagaagggggcaagtttgttccctacagtcgctggacgcaggattacattgccattatgggcggtcgctaacttcgctggggtgctttatgacgtacgcagtggagtttgacaacgtcagccggttgtacggtgacgtgcgcgcagtagatggcgtcagtattgcgataaaagatggtgagttcttctctatgctggggccgtccggctccggcaaaaccacctgcctgcgcctgattgctggcttcgaacagctttccggcggggctatctctatctttggtaaacccgccagcaatctgccaccgtgggagcgggacgtgaatactgtctttcaggactacgcgctatttccgcatatgagcattcttgacaatgtcgcctatgggctgatggtcaaaggcgtgaataaaaagcagcggcacgcaatggcgcaagaggcgctggagaaagtggcgttggggtttgtacatcaacgtaaaccgagtcaactttctggtggtcagcgccagcgggttgctatcgccagagcattggtgaatgaaccgcgcgtattgctgttggatgaaccgctcggcgcactggatctcaaattgcgtgagcagatgcagctggaactgaaaaaactgcaacagtctctcggtatcacttttatcttcgttacccacgatcagggcgaagcgttaagcatgtccgatcgtgtggcggttttcaataatggacgcattgagcaggtcgattccccgcgcgatctctatatgcgcccgcgcacgccgtttgttgccgggttcgttggtacaagcaatgtttttgatggactgatggcagagaaactttgtggcatgacgggaagcttcgccctgcgaccggaacatatccgcctcaacacccctggtgaactgcaggccaatggcacgatccaggcggtgcaatatcagggcgcggcaactcgttttgaactgaaattgaacggcggtgaaaaactgcttgtgagtcaggccaatatgacaggcgaagaactgcctgccacgctcacgcccggacaacaggtgatggtttcctggagccgtgatgtgatggtgccgctggttgaggagaggtgaatggcgatgaatgtattgcaaagtcctagtcgtccaggtctgggtaaggtgtccggtttcttctggcataatccggggctggggctgtttttactgctgcttggcccgctaatgtggtttggcattgtctatttcggcagcctgctgacactgttatggcagggattttatacttttgacgatttcaccatgagcgtaacgccggaactgacgctggcgaatatccgtgcgctgtttaatccggcgaattacgacatcattctccgcacgctgactatggctgtggcagtcactatcgccagcgccattctggcttttccaatggcgtggtatatggcgcgctataccagcgggaaaatgaaagcgtttttttatattgcggtaatgttgccgatgtgggcgagctacattgttaaagcctatgcctggacgttattgctggcaaaagatggcgtggctcagtggtttttacaacatcttgggctggaaccactgctgactgcgttccttacattacctgcggtgggcggaaatacgctgagtacttccgggctggggcgctttctggtgtttctctatatctggttgccgttcatgatcctgcccgttcaggcggcgcttgagcgtttgccgccgagtttgttgcaggcgagcgctgatctcggcgcacgtccacgacaaacctttcgctatgtggtgctgccgctggcaatcccgggtattgccgctggctctatctttaccttcagtctcacactgggcgattttatcgtcccgcagctggttggtcctccaggatattttatcggcaatatggtttattcccagcagggggcgattggcaatatgccgatggcggcggcattcaccctggtgccgattattctcatcgcactgtacctggcgttcgtgaaacgtctgggagcgttcgatgcactctgaacgcgcaccgtttttcctcaaactggcggcctggggcggcgttgttttcctacattttcccatcctgataatcgccgcctatgcgtttaacactgaagatgcggcgtttagttttccaccgcagggcctgacgctgcgctggtttagcgtggcagcacagcgtagtgatattcttgatgccgtgacactgagtcttaaagtggcggcgctggcgacattaattgcgctggtgttagggacgctggcagctgccgcgctgtggcgacgagactttttcggcaaaaacgccattagcctgttactgctgctgcccattgcgctgccgggcattgtcactggtctggcgttattaaccgcctttaaaaccatcaatctggagccgggatttttcaccatcgtggtcggtcatgcgactttttgtgtagttgtggtgtttaacaatgtcatcgcccgttttcgccgcacctcctggagtctggttgaggcgagtatggatcttggggccaatggctggcaaaccttccgctacgtagtgttgccgaatctcagtagcgcgttactggcaggaggaatgctggcgtttgccttgagcttcgatgaaatcatcgttacgacctttacggcaggtcatgaacgaacgttaccgttgtggttgctcaatcagcttgggcgaccgcgtgatgtaccggtaactaacgtggtggcactgctggttatgttggtaacaaccttgccgatcctgggggcctggtggctaacccgcgaaggcgacaatggtcaataaccactgatacaggaatatgctatgcaacataagttactgattaacggagaactggttagcggcgaaggggaaaaacagcctgtctataatccggcaacgggggacgttttactggaaattgccgaggcatccgcagagcaggtcgatgctgctgtgcgcgcggcagatgcagcatttgccgaatgggggcaaaccacgccgaaagtgcgtgcggaatgtctgctgaaactggctgatgttatcgaagaaaatggtcaggtttttgccgaactggagtcccgtaattgtggcaaaccgctgcatagtgcgttcaatgatgaaatcccggcgattgtcgatgtttttcgctttttcgcgggtgcggcgcgctgtctgaatggtctggcggcaggtgaatatcttgaaggtcatactagcatgatccgtcgcgatccgttgggggtcgtggcttctatcgcaccgtggaattatccgctgatgatggccgcgtggaaacttgctccggcgctggcggcagggaactgcgtagtgcttaaaccaagtgaaattaccccgctgaccgcgttgaagttggcagagctggcgaaagatatcttcccggcaggcgtgattaacatactgtttggcagaggcaaaacggtgggtgatccgctgaccggtcatcccaaagtgcggatggtgagcctgacgggctctatcgccaccggcgagcacatcatcagccataccgcgagctccattaagcgtactcatatggaacttggtggcaaagcgccagtgattgtttttgatgatgcggatattgaagcagtggtcgaaggtgtacgtacatttggctattacaatgctggacaggattgtactgcggcttgtcggatctacgcgcaaaaaggcatttacgatacgctggtggaaaaactgggtgctgcggtggcaacgttaaaatctggtgcgccagatgacgagtctacggagcttggacctttaagcagcctggcgcatctcgaacgcgtcggcaaggcagtagaagaggcgaaagcgacagggcacatcaaagtgatcactggcggtgaaaagcgcaagggtaatggctattactatgcgccgacgctgctggctggcgcattacaggacgatgccatcgtgcaaaaagaggtatttggtccagtagtgagtgttacgcccttcgacaacgaagaacaggtggtgaactgggcgaatgacagccagtacggacttgcatctagcgtatggacgaaagatgtgggcagggcgcatcgcgtcagcgcacggctgcaatatggttgtacctgggtcaatacccatttcatgctggtaagtgaaatgccgcacggtgggcagaaactttctggttacggcaaggatatgagtctttatgggctggaggattacaccgtcgtccgccacgtcatggttaaacattaaggataatattgcagatcgtaagagtatgagatgatcttgcgtactgtcagagcactgatttctctgacagtacgtgctgcgtgcaaaatcactacatcaaataaaccagccaaatctcatagagataagagtaaacaaaccaacagcagcaaagaaatttatcagtactacagttctactggaaacattcatttttgccaccttttatcattgcccctatgtgtatagtacgggttaagaaaatccgcaataatactcattctgaagatggataagggcaagttgctgtttgatgattttttctcaaactggtgaaaaaacttgatgcacgtcaaaaaatgacgcatatttgcgcgcgttttattcatctggctggacgcccgtacatgtctctctatcaacacatgcttgttttttatgcggttatggcagcaatcgcatttcttatcacctggtttctttctcacgataagaaacgcatccgtttcttaagcgcctttctggtgggggcaacatggccgatgagtttcccggtggcgctgttgtttagtctgttttaaatcttactcactggcttgacggcaccacgcagacttatatcatttggatgaatcgataaatttcacaagtggctaaggagaaagtatgagccatctggatgaagtcatcgcgcgcgtggatgccgcgattgaagagagcgtcattgcccatatgaacgaattattaatcgccctgagcgatgacgcggagttaagtcgggaagatcgctacacccagcagcaacgtctgcgcacagcgatcgcccatcacggtcgcaagcataaagaagatatggaagcgcgccacgaacagttaaccaaaggcggcaccatcctctgattaaaaactgcgtctggctaccaaccaggcgccaaccacaagtaaaattgcgccacaaattgggccgaacaacgcccgtagtggtacgccatgactgcggaagatatccagcatcagaccgccaatcagctgactggcgaccagtacagcaatagttgtcgccgctcccacattctgatatccgctgatactggcgaagacaaaaaagcttcccagcaagccaggtataagtgtccaccagcgcacgctggacaccagttcgccaaaccccgccatgccttgtttaaaccataaaatagaaacaaagagcacaatccccaccagactgttcagcaacatggcgatgagaatggtagaggaggtctgggtgatgcgcaccatcagcgtgttctggacaaccagaccaattccggcggcaatcaaaaaagcaagggtgaggctctgattcatccaatcgcgtccggttcagtgcgctcgtcgagttgcaactgcataaatgtcagatccagccaacgaccaaatttagtgcctacctgcggcatttgcgcggtgacgacaaatcccaggctctggtggagatgcaggctggcctgattttggctttcgatcccggcgaccatgacatgcttcccgcaatcccgcgcttcatcaatcaatcggcttaacaatttacgccccagacctttgccctgatgatcgggatggacataaacgctatgttccacggtatggcgaaaaccatcgaaactacgccagtcgccaaagctggcatatcccgtcactacgccgttttcctcgctcaccagcactggataacctgctaaagtccgcgcttcaaaccaggcaatgcggttatcagcatccaccgtttggtcattccagatagccgccgtatacaacacggcgtggttataaatttccgcaatggcagcacagtcggctttgcgggcaaaacggatggacatgtctggcctcaataaaataatgatgatgatgttatcaatactatcgaaaacagcccgaagcaacggattcctcgatgaaattattgcgtgttgcagaggggatgtgacggctgcaaacaaaaccaatcccgtgagcctgctactattgatggattcatgccaaaagcacaggagagcattatggggcaacaaaagcagcgtaatcgacgttgggttctggccagccgtccacatggcgcacctgttccggagaatttccgtcttgaagaagatgatgtcgccacaccgggtgaaggacaggtgttactgcgcacagtttatttgtccctggacccgtatatgcgtggacgtatgagcgatgagccatcttatagtccgcctgttgatattggcggcgtgatggtcggcggtacggtgagccgtgtcgtggagagcaatcatcctgattatcagtctggcgactgggtgctgggctacagtggatggcaagactatgacatatccagtggtgatgatctggtgaaacttggcgatcatccgcaaaatccaagctggagcctgggtgtgctagggatgccaggctttaccgcttatatgggcctactggatatcggtcagcctaaagagggcgaaacgttggtggtagctgcggcgacaggaccagtgggggcgacggtggggcaaatcggcaaacttaaaggttgcagagtggtgggggtagccggtggcgcggaaaaatgccgccatgctaccgaggtgttaggcttcgatgtttgtcttgatcaccacgcggatgattttgccgaacaactggcgaaagcgtgcccaaaaggtattgatatctattatgaaaacgtgggcggtaaggtattcgatgcggtgctaccgttacttaatacatctgcgcgcattcccgtctgcggattagtgagcagctataacgctacagagctaccacccggtccggatcgtttacctctgttgatggctacagtgctgaaaaaacgtattcgcttgcaaggttttattatcgctcaggattatggtcaccgcatccatgagtttcagagggagatggggcaatgggtgaaagaggataaaatccactaccgcgaagaaattactgacggtttagagaatgcgccacagacgtttatcggcctgctgaagggtaaaaacttcggcaaagtggtgatccgcgtggcgggtgatgattaaagtttcaacggcggcgtaagccgccataaaaatccaggcaaaaagcttattttcagctttaattaactaaccacatcattgttctgctgctaataacaacaaaggtgagtggtttatgattattcactttaatacaccaggtgaattccttctgccatgcaggcagggttggacagaaaacacgcgaaggaattaaaatgcctggaacgggaaaaatgaaacatgtcagtttgactctgcaggttgagaacgacctgaaacatcagcttagtattggcgcattaaaacctggcgcacgcctgattactaaaaatctggcggagcaattaggtatgagtattacacctgtgcgtgaagcattattacgtctggttagcgtgaatgcgctttctgtcgcacctgcacaagcatttacagttccggaagtggggaaacgtcaattagacgaaatcaatcggatccgctacgaactggaattaatggcagttgctctggctgttgaaaacctcaccccgcaagaccttgcggaactccaggaattgctcgagaaattacagcaggcgcaagaaaagggcgacatggaacaaatcattaatgtaaacaggctatttcgcttagcgatttatcatcgcagtaatatgcccatcctgtgtgagatgattgagcaactgtgggtcaggatggggcctggtttacattatctctatgaagcgattaatccagcggaattacgggagcatatagaaaactatcatctgttactcgctgcgttaaaagcaaaagacaaagagggatgcagacattgtcttgctgaaattatgcaacaaaatattgctattttataccagcaatacaatcgttaaagtaaatgcccggcaaataccgggcatcaaggtaattactcaaatctccacgcaatattcatgccgacaccataatttcgtccggggctaggttcgtaatatcgcccgttactctcattgacaatgacagaaccaacgtattctttatcgaataaattatcgacacgaccaaataaatccacagttaaattgtggtaattgtatttatacccggtgaataagccgacgagagtataagacggcgcttttgccgtattttcatcatctgccataatatcgcccatataacgcgcttccgtgcctgcataccaaccatcttccggtacataacctatgctcgcaaagcccatattacgggcgatccctggcatccgattaccgttacaatcctgttcattgcaaacattgctgcgataggtcgcatcaagccaggtccaggacgcgtttacgcgaaaatctcctgcgaaacgttgatcccatgccagttcagcgccttgacgacgggtctttccggcatttttgtaagtcgtacgcccaccgctactgctatcgacaacaatttcatcatcagtgtcggtctgaaacaatgcgagactaagcagcccatcaccaatacgcgttttactgccgatctcaattgtatcgttggtggatggttttaaacctaagttcataccgctttgcccatcagcacgataagacagctcattaatcgtcggcgtttcaaaacctcgcccggctgccagatagatattccaggcatcggtcattgcatattttaagctaccggcaggtagccatttatgataactggcatcaccgctgtcatcgccgttacccggagtaacgtaatggtcgttggaatcaaaccacacggagctgtagcgcacgccagcatccaggctcagtttttcgctcagctgccactgcgtctgtaaatagggatcgatgttccacatcagattgcgttcgtcgcgacgcaactcacctttttgcccgtactccggcatgccgctattcaggcggaagttattgtagcccttgcggttttcactcatgttttcgtagttcaggccggtagtgaacgtgaccggaacgcccagttcaccacggtgtgtccagcggctgtctattccctggtaatggcgttgcagggtaatcacgccgcccgcatgactcgggttaagttgtggtgccatgggtatactctggtactgggtcgtttctcgctctccggcatacatcatcacactcatatcatcccggctactcaggctacgctcatagcgcaacccagcctgagtttgcttgatggtttttcgcgtgtcgtactgttctgcacgaggcgcttgttgtggattagccttccattctgctttggttagcccacctgggtcatctgctttgatatccacactattgaaaatcagacttaatttgctggcttcatcaatgcgtacgcccagtttggcattggctaaatttttctgtgcgccactatggtcacgatagccgtgggtcgtaaaacgcgtggtactgacggtgtaatcgacatcgccaggctgtgtgccgtctcccgttgcgcccgttgctttcagcccatagcgccagctgccaaaactgccgtagtaactactggcttcaatggttggtggctgttgtccggtctgggtggtgacattcattaccccaccagacgcgttgccatacagggcagagaaggggccacgcagcacttccacattttgcacactgcttaaatcgatgttggatgtttgcccttgcccgtcgggcatggtggcgggaataccgtccacatacaggcgaataccgcgaataccgtaagtggagcgggagccaaatccgcgaatgctcagctgtaaatcttgcgcatagttctgccggttttgtacctgcaaaccaggcacgccggtcagactttcggacaagttaatgcgcggtgttgccaggcgcatctcctcgccatccaccacgcttactgctgctggggtatccagttcactaaccacctgcggtgcggcactgacaatcatagtctgttcatcagcggcaaaaacaacgggggaaaggacaagcagtgcgggcaaaacggtctgtcggacggaaaaaatcttcatgaaaaaagccaggttaagaatgggaaaacgccgtcatggtaatgaaattgtaaatttatggaaaatgaaacggcacaatacgttaagtaattgagaaaattgtagtcgtaacggcaagaaatgctccacatttgagaaaataatgattaccattcccatttataacaagagcgtaacgatgattacgcttagcgaagcattgtgaagcagcaaaaatatcggttcatcaaagggagtcgtcatgcatttacgtcatctgtttagtagccgcctgcgtggtagtttactgttaggtagtttgcttgttgttagtagtttcagtacgcaggccgcagaagaaatgctgcgtaaagcggtaggtaaaggtgcctacgaaatggcttatagccagcaagaaaacgcgctgtggctcgccactagccaaagccgcaaactggataaaggtggcgtggtttatcgtcttgatccggtcactctggaagtgacgcaggcgatccataacgatctcaagccgtttggtgccaccatcaataacacgactcagacgttgtggtttggtaacaccgtaaacagcgcggtcacggcgatagatgccaaaacgggcgaagtgaaaggccgtctggtgctggatgatcgtaagcgcacggaagaggtgcgcccgctgcaaccgcgtgagctggtagctgacgatgccacgaacaccgtttacatcagtggtattggtaaagagagcgtgatttgggtcgttgatggcgggaatatcaaactgaaaaccgccatccagaacaccggtaaaatgagtaccggtctggcgctggatagcgaaggcaaacgtctttacaccactaacgctgacggcgaattgattaccatcgacaccgccgacaataaaatcctcagccgtaaaaagctgctggatgacggcaaagagcacttctttatcaacattagccttgataccgccaggcagcgtgcatttatcaccgattctaaagccgcagaagtgttagtggtcgatacccgtaatggcaatattctggcgaaggttgcggcaccggaaagtctggctgtgctgtttaaccccgcgcgtaatgaagcctacgtaacgcatcgtcaggcaggtaaagtcagtgtgattgacgcgaaaagctataaagtggtgaaaacgttcgatacgccgactcatccaaacagcctggcgctgtctgccgatggcaaaacgctgtatgtcagtgtgaaacaaaaatccactaaacagcaggaagctacccagccagacgatgtgattcgtattgcgctgtaatagatatggcgagggtgaaaacggtgagacttgcctgccttttatcacggcgtatccggcactttcgtcagtaatctgaatttgcccggcacgtagccgggcaattttgcaattaactcgccgtttcaggcttaaacacaatttcctgtttttcttcatcttcctcgacgactggcgcagtgctgtgaatttcagcaacgcgtttgcgcacaccaaaccagcctataaccagcaaaataccgataatcggcagcgccgcgatagtataagtcccgttcgggtaatcgaacgccatcagcacaaggacactcagtaaaaacagtaatgtcagccaggaagtgaagggcgcgccaggcagtttaaaactgacatccgctgctttgccttctttaatcgctttacgcaggcgcatctggcacacgatgataaacgcccaactagcgatgattcccaggctcgcgaagttcaacacaatctcaaatacgcggctcggcaccagatagttgaggaatacgccgacgacatacacaactagtgtcgccagaatcccggcatacggcacatgctgacgactcattttcgccataaaactcggtgcggaaccgcccatcgccatactgcgcagaatacgtccggtgcagtacagaccactattcaggctggagagggcagcggtcagcaccacaatgttcataatgctgccgatatatggcacacccagtttagagaaaaacgtcacgaacggactttgccccgcctgatacgcgctccacggcaataacataaccagcaacaccacggagccgacgtaaaacaggccaatacgccaaatcacactgttaatggctttaggcaccatggtctgcggatctttacattctccggcagctgtacccaccatttcaatggaggcaaaagcaaacactacgccctgaatcaacaccagcgcaggcagcaaaccgtgggggaagaagccgccattatcggtgattaaatgaaagccagtggtgttgccatccagcggctgaccactaccgaggaacactgtacccacgaccaaaaaggtcacaatggcgagcactttaataagcgcaaaccagaactccatctccgcaaaccatttcacaccgatcatattcatggtgccaacgatggtaagtgcagcgagcgcaaagacccactgcggcacgccgccaaacgcaccccagtaatgcatatacagagcgacggcggtaatatcaacaatccccgtcatcgcccagttgatgaagtacatccagccagcaacataagcggctttctcacccaaaaactcacgggcataagaaacaaaactgccactggaagggcggtgtagcaccagctcacccaatgcacgcagaataaaaaagctaaacaagccacaaattaaataaaccagtgccagtgcgggccccgccatttgcagtcgggctcctgcacctaaaaacaagccggtgccaatcgcgccgccaatggcgatcatctgcacctggcgattgcccatcgctttgtgatacccctcttcgtgggcattaagccagcggcgtttcgcggcgtgttgatcactagtgtcggtgtcgtgtttactcattgctctccctgattgctttaatgaaaaagtcatataagttgccatgaacaatgtttattcatcctggcgatgatagttatcaccattattctttatgggtataaaactatcggcgcagcatcctacccgttatcgataaacgatgcaaaacatccccttacaatcctgaaggggattaatacaactgacgaaaaaatgacaaatccttttgctggttaacctgtgtactgtcctacacttaatctttaaaagattgtgaggggcatatgattaaggtgtatggcgtacccggatggggctctacaatcagtgagctgatgctaacactggctgatattccttatcagttcgttgatgtcagtggttttgaccacgagggagctagtcgcgagttattgaaaaccctgaacccgttgtgtcaggttccgacactggcattggaaaatgacgagattatgacggagacagcggcgattgcattgatggttctcgatcgtcgcccggaccttgcgccaccggttgggcgcgccgaacgtcagctgtttcaacggctattggtctggctggttgctaatgtctatccaacattcactttcgccgattaccctgagcgttgggctcctgacgcacctgaacagttaaagaagaatgttattgaatatcgaaaaagcctttatatctggttgaatagccagctcactgctgaaccttatgcgtttggtgagcaactaacgctggtggactgttatctttgcactatgcgcacatgggggcctgggcatgaatggtttcaggataatgccacgaatatcagtgcgattgctgatgctgtatgtcagttaccgaaattacaagaagtattaaaaaggaatgaaattatttgagtgggataccagaagattatgttatttattattcagtaactttatccacaatgatgggcgtaattaattaaattcatggtatgttttttaatttatatcactctccttttcattcagcgtgtctatttcatttcctctgaaaagaaactaactattcacatcgtgcagatgtttcagttgttaagtcaggcattctataatctcaaaatgtttttaatgatggatatgctcggagttggagatgcaattaatattaatacaaataaaaatatccggcaggtatgctaaaaggataaatggcgttctctgtatttattcgcaattatctgtaggacaaatatggagagcttgatgagtcagagctaaaacagcaattgattaataaacatgttgatttattcaagaaaatggatgtattttaaatgttgattcttaatataacctaatcaatagattatcaagtgagagctacacattattggaggggcaggggaaaacaccattttgggaacaatgcatcaggtactcttaccactgaagcaagatcatccggcaccaggtggtggtgcagtgctttggaaatggtcccctcgggggagttgtcattattttctatgctatttgcttattatattcatcaggtgaatttaataaattcctaatttgaaatatccactattaagctagtgtttaacgacgttaagatggcaatgtgcagatcatgttatcagggtggggcggtagcgtatattccttatacaaaccatcattcatttcaatgattgttattgaattatttattgttgtgaataaaaagacattatgaatattggtttgactttgcatatcaggttttttattactcgctgtaatgtacgagcctgtcgtgaataacgtcgagaacccatccgttgcgtttgtgattattttgttgactaaacagacacccgtttctctgaagtaaaatcccagactaaatcatcacataaccatgacatttttctgatattccccggtaacgccagataacgatgccaaatttaccgttatgttcaatcaactccctggtccatgtcgatttatctaccacaatcgccacgcgtggaggttcaaactccaccggcattgaccaggctgcagccataatgttacgccgctgggattgctcatcgaaactggtgatcaagaccgttgggccatgatttaacagacggctggcatggtgtaattctatggggatgaatcggctcatggtatcgcctcgcgaagaaggtttttttaagcgtagtccgtaacgcaataagtaacgaaattaacgggattggcgatttgcgaacgtgatgcatgtccgcgatcgcacaaaatagccggtgcggcgtctattccaggttataagttgagaaaaccactaagggaaacgcctgatgacgcccattctgaatcactattttgcccgtattaactggagcggagctgctgcggtcaatattgatacgcttcgtgcattgcacctgaaacacaattgcaccattccgtttgaaaacctcgacgttttgctgccgagggaaatacagcttgataatcaaagcccggaagagaaactggtgatagcccgtcgtggcggttactgttttgagcagaatggcgtgtttgagcgggtgttacgcgagctggggtttaacgttcgcagcttgttagggcgcgtagtgttaagtaatccgccagcattaccgccgcgcacccatcgtttgctgttggtggaactggaagaggaaaaatggattgctgatgtcggtttcggtgggcagacgctaaccgcgccgattcgtttagtttccgatctcgtgcagaccacgccacacggagagtatcggttgttgcaggagggtgatgattgggtgttgcagtttaatcatcatcagcattggcagagcatgtaccgttttgatctctgcgagcagcaacaaagcgattatgtgatgggcaatttctggagcgcgcactggccgcagagccattttcgccatcatttgctgatgtgccgccatttgccggacggcggcaagctgacactgaccaattttcattttacccattatgaaaatgggcacgcggtggagcagcgaaatctaccggatgtggcgagtttatatgctgtgatgcaagaacagtttggtctgggcgtggatgatgcgaaacatggctttaccgtggatgagttagcgctggtgatggcggcgtttgatacgcacccggaggcgggaaaataatttatgtcaggttgccggatgcggcgtaaacgccttatccggcatacattagcccggttgtagacctgacaggcgaagcgcatcagacaacggtttcagagttcaattgcccattcggcatgaaacaaaatcaccgctgtgccactaatggtgactttttccggttggttatcacgaattgtcaccgtcacttcaatcataccgtcacgccccaatgcgcgcccctgatggcctttaacacgcaacacgttgccatcgtggggcaatacgttgtgatgtaccaaccatgcacccatcgggccattggcattgccagtcaccggatcttccacaataccaatcgcagggctgaacatgcgaccatcggtttcgtttttgcctgggcggatctggaacgggaagaaaccattgcagccaatctttttgctgatagcggtcagcgcattaaggtcagggctaagggcgtcgatatccacttccggtttcagtgggatcatcactttactgtgtcctgttgttgccacctgaattggcaagcctggcagaatatcgtcctcagtgagatgaagcgcgttgataatcgccgcacgtgtttcaccttccagcggtggctcaaagcccggcgtaccttgttccaggctaatacgataatcatcgttgtgcttttcgatagtcacgcgatgttttcctgccaggcttgtttgccagatcgtgcaatttcctaaacctaacaccttcgcacgtacatagtgcgcagctactgtcgcgtgaccgcaaatcggcacttcaaccgttggcgtaaagtagcggatgcgcacatcgctgtcgtcgctgtgcagcagaaaagcagtttcgctatggcctaactcgcgggcgataagctgcatttgcgcttcgctaagattatcggcggggaaaacaacaccggcagaattgccgcgaaacggttgactggtaaaagcatcgacgtggtacacctgcggtttcattaacgttctcctgtgactggagaactatcatagcctgcaagtggccggagagcgaagggctatccggccagggtgaaattatcgccggctacgcacaatttgatatcgacgagtaaagtactcaaacggcgcgctccacacatgcaccagtcgggtgaacgggaagagcaggaagatggtcattcccaacaccagatgcaggcggaagacgaacgctacgccgttgagcatctcactgcttccaccacggaaagtgacaatgctttgcgcccaacccaccagcttcatcatttcgctaccatcaggatactgtgcactaaacggtatggtacttagccccaacagacactggatcagcaaaatgctcatgatgatgatatccggcgtagtggaagtggcacgcacgcgctgatttgtcagcctgcgccacagcagtcctgcgccgccaatcaacgtcaacacaccgcaaataccgccgagcaccatcgccatgagttgtttcgctgccactggcaaaaaccacgcgtacatccagtgcggcgttaacatgccgaacaagtgcccgaagaaaatccccaaaatgccgatatggaacagattgctccatatcaccatcccgcgtttatcgagcatttgactactggaggcgcgccaggtgtactgcccgtagtcgtagcgcagccagctgccgaggaaaaacaccgtcgcacaaatgtacgggtagatatcgtaaaaaaagacgttcagatactgaatcatttcccacctcccgcactgatgtcgacatattgcggcgcgacatcctggctaaagcgtcgctgatattgattaagcgggctgctgtcacacgccgtggcgttatcttcaataaacttcacctgttcctcttcccacactgcatcaagcgcctggcgggtgtcatcgcgctcttcgctgtttacttgttttgtgacactgtcactactaagggagcttcccgccagttgcagcagagcatcaaacaacgcgtaccacggtgcctcgcgttgttttaagcgaccgccaagcagggcgaggatcggcgcaacattgagcaatccttctttcgcctgatcgtcaggcagtacgcttaaatactccagatacagcggtagataatcgggcagttcccgacaatccagctgcaggccgaccttttcatactccgccagcaggtccaccattgcctggccgcgatcgcgggactcggcatgaacatgttcgaacagcagcaggctcgtggtgcgcccgcggtcaaacacttcgcaccattcggcctgtttatccagcagcggcgcgttaagcaggttgtgggtgaaatccgtaagcatcggcgcgtcgcggcggatcaacgccagcgcgtcctccttgcattcccacaacagctcgtccggatactccatcaacaggccgatcactttgaggatctgcattattcgccctccgctttgtcgcgcacttcggtgatgttgatggcatcgatacggctactgttgaacaggttgaatttactgtcgctaccgtggcaaccgtcgccaaaggtaaaaccgcagccgttgcgttctgcgaaggcatcgcccgccatttcccgatggctggtcgggataacaaaacgatcttcatagttggcaatggcgagatagcgatacatctcttcgacctgggcgacgctcaggcctacttcgtcgatggcacgagtatcagtaacgccttccacggtttgactacgcatatagtggcgcatcgccatcatccgtttcagcgcccgcagtaccggaccggtatcgccggcactcaacatattggcgagatattgcaccggaatacgcaggctttcgatggcgggcagcacgccttcgcttttcggcaaaccgcccgcatctgcgtaggactgaatcggactcagcggaggaacgtaccagaccatcggcagggtgcggtattcagggtgcaacggtagtgccagtttccagtccatcgccattttgtagactgggctacgctgggcagcgtcaatcacattttgtggaataccttgtttcagggcttcctcgatcacactgggatcgtgtggatcgaggaacacttcgcactggcgttcatagaggtcaacttcgcgctcggtgctcgccgcttcctcgatgcggtcggcgtcgtaaagcagcacgcccagataccggatgcgacccacgcaggtttcactgcacacggtcggttgaccggactcaattcgtgggtaacagaagatgcatttttcactcttgccgcttttccagttgaagtagatttttttgtacggacaaccgcttatgcacaaacgccagccacggcatttatcctgatcaatcagcacaatgccgtcttcttcgcgtttgtagatagcgccgcttgggcaggtcgccacgcagctgggattgaggcagtgttcgcacaggcgcggcaggtacatcatgaaggtgttttcaaactgcccgtacatctccttttgcatggcctcgaagttgcggtcgcgggcacgtttttcgaactcaccgcccagcagttcttcccagtttggcccccagatcactttgtccatccgtttgccgtcaatcagactacgcgggcgagcagtaggaatatgtttgccttccggtgcgctatgcaaatgttcgtagtcgaaggtgaaaggttcgtagtaatcatcaatctgcggcaccaccgggttggcgaagattttggttattacgcccatcttgttgcccagacgcgggcgtatcttgccattcacatcacgcacccagccgccttgccactcttcctgatcttcccagtttttcggataaccaatgcccggtttggtttcgacgttgttaaaccatgcgtactccatgccttcgcgcccggtccagacgtttttacaggtcacgctacaggtatggcagccgatacatttgtcgaggttaagcaccatgccgacttgactacggattttcattttttcgcctcctgtacctgatcgcgaccttcatcatccagccagttaacgttcttcatcttgcggatcatgatgaactcatcgcggttgcttccgacggtgccgtagtagttaaagccccaggccagctgcgcgtaaccgccaatcatatgcgttggtttcgggcaaacgcgggtaacgctgttatgaatgccgccgcgcatgccagttacttcgctaccaggaatattcataatgcgttcctgggcgtgatacatcatggtcatgcccggcggtacacgttggctgaccaccgcgcgggcagtcagcgcgccgttggcgttgaatacttccacccagtcgttatcgacaatggtcagttctcgggcatctgtttcgctgatccagacaatcggtccaccgcgagagagcgtcagcattagcaggttttcactgtaggtactgtgaatgccccatttctggtgcggcgtcaggaagttaagtgctttttccgggaagccgtttggcggtatctggcgcatctcactgacgctacgggtgtcgataggcgggcgataagccaccaggctttcaccaaaagcacgcatccacggatgatcctgatagagctgctggcgtccgctcagcgtgcgccacggaattaactcatgaacgttggtgtatcccgcgttataggagacgtgatcgctttccagaccggaccaggtggggctggagataattttacgcggctgcgcctgaatatcgcgaaagcgaatcttctcgtcctctttgtgcagcgccagatgggtatgttcgcgcccggtgatctcgcccagcgcctgccacgctttgactgcaacatgaccgttggtttccggtgccagtgccagaatcacttcactagcgtcaatggcggtgtcaatcagcggacgcccctgtgccgggccatcacgcttggtgtaattgagtttgccgaggaaatcgatttcatcctgggtattccagctaatccctttaccgccattgccaagtttgtccatcaatggcccgaggctggtaaagcgttcatacgtagcagggtagtcgcgctccaccgccacaatattcggcgcggttttgcctggaatcagatcgcattcgcctttgcgccagtcgagcacttcacacggctgactgagctctgccggagagtcatgcagtaggggttgtaataccacgtcggtttctttgccaagatgacccacgcacacttggctaaatgctttggcgatacctttgtagatttcccagtcgctgcgactttcccacgccggatcgaccgccgcagaaagcggatgaataaacggatgcatatcgctggtgttcatatcgtctttttcgtaccaggtggcggtgggcagaacgatatcggagaacaggcaggtactggacatgcggaagtcgagcgtcaccagcaggtcgagcttgccttcaatcgctgcagtttgccactcgacttcttccggtttgatcccgtcgctggcaccgagttcctcgccctgaatcccgctttcggtccccagcagatacttctgcatatactcgtggcctttgccggaggagccaagcaggttagagcgccagacaaacaaattacgcggatgattgctgctgctatctggttgttcgcaggccatacgtaaatcgccgcttttcagcgcctgggcggtaaattctgtgggggataatccggccttgtcggcttcagctttaatcccgagcgggttacgccccagctgcggcgcagaaggtagccagcccatacgttcggcgcgaacgttgaaatcaatcagatgaccgctgtacttactggcatcggcgagcggactaagtaactcctgagcagagactttttcatagcgccattggctggaatgattgtagaaaaagctggtgctgttcatttggcgcggtggtcggttccagtcgagcgcaaaggccagtggcaaccagccggtttgtgggcgcagtttttcctggccgacatagtgtgcccagccgccaccgctttgcccgacacaaccgcagaagatcagcatattgatcatcccgcggtagttcatgtccatgtgataccagtggttaacacctgcgccgaggataatcatgctgcgcccatgcgttttatgggcggtatcggcaaattcacgggcgatggtttcaatatactggcgcggcacgccggtaatttgctcaccccaggctggggtgtacggtttgatttcagcgtaatctttcgcactgttttcatcttccagcccgcgatcgaggccgtaattcgccagtaccaaatcataaacgctgaccaccggacaggtgttgccatcgactaacgtcaggtttttaacgggcaattggcgcaccagcaccggattgtgttttacgctgcgaaaatgcggattttcaatgccgccaaagtaggggaaggccacgcctgcaacagcgtcatgttgaccgagcagggttaagctcaattcggtttccgtaccggcggcaatggattccagattccatttgcctttttctccccagcggaaaccaatgctaccgttcggcactaccaattcacctgcggtattaactgctacggttttccactgcggattgttgctttcgcccagtccatccaccaggtcagatgcgcggatcatgcgcccgggaacgtagctaccatcgtcgcgaggctccagcattaccagcatcggcatgtcgctgtagcggcggcagtagttgataaagtagtcgctgggattatcgagatgaaactcttttaaaatcacatggcccattgccatcgccagggcgctatcagtgccttgtttcggtgccagccactggtcgcacaatttggccacttcagagtagtcaggggtaatggcgatggttttagtgcctttgtagcgtacttcggtaaagaagtgggcgtccggcgtacgtgtctgcggtacgttagacccccaggcgatgatgtagctggagttataccagtcggcagattccggtacgtcggtttgctcgccccaggtcatcgggctggcgggcggcaggtcgcaataccagtcgtagaaacttaaacaggtgccgccaagcaggctcagataacgcgttccggcggcgtaagaaaccatgctcatcgccgggatcgggctgaaaccggcaacgcgatccgggccgtaggttttgatggtccagacgttagcggcggcaatcagctggtttagttcctgccagttggagcggataaacccgccgcgcccacgcacttgtttgtagctcaggcacttttgcggatcgttcataatgcttgcccacgccagtaccggatcgctgtgttgcttgagggcttcgcgccacagttcaatcagtcgtttacgaatgagcgggtatttcaggcggttagcgctgtaaagataccaggagtaacttgcgccacgcgggcagccgcgaggttcatgattgggcaggtcagggcgagtgcgcgggtagtcggtctgttggatttcccaggtcaccagaccatttttaacgtagattttccagctacaggagcctgtacagttaacaccgtgggtggaacgcacgattttgtcgaactgccaacgctggcgatagctgtcctcccagtcgcggttgctatgcatcacctgtccgtgaccatcggcaaaggtttcgcccttttgtttgaagtagcgaaagcgatccaaaagtttactcatgacatgactcctgctccaggaatgaattgggatctgatgccttgtcggatgcgacacggttgtacatcaggcatcgatctcttatttttggctgaacttccgccgaccataaaccagccaggtcagcagcacacaaacgatgtagaagattaaaaacactttcatcgcgccgaccggagagccggtcatattgaggctcatgccaaacgcctgcggaataaaaaagccgcccactgcgccaatggcactgataaagcccagagccgccgccgtttcggtgacggcttctttatgagcttgctcatcactaccgcctttcatctttacccgataaatggttatctggcgaaagatgacggcgatcatctggaaagtagaaccacttcccagacccgcagtcagaaacagccccataaatacggcgtaaaaggcgatgaaattaccggagcctgtgcccggtaaggtaaggaacagcagggcactgaaaatcgccataaaaataaagttgatcaacgtcacccgcacgccgccgaacttatcggaaatagcaccaccaacgctccgcgcgatggcaccgataaatgggccaaagaacgccaggcgcagaatattcacatccgggaactgggtttttgccagcatggcaaaacccgcagaaaaaccgataaagctaccgaaggtggcaaggtaaagcaggctcagcagccagagatgcaggcgttgtaagacagggagctggtcggcaatactggcgcgactactggcgatatcattcatcccactccatgcggcgatcgtggcaatcgccagtagcggtacccaaatccatgcggcattcgccaggctcatcacgctaccgtcggcctgcggtacgccattgacgccgagaaaggcaaatacaggtacaaaaatgaccagcggtgcaaccagctgcattacacttacacctaagtttcctaatccgccattaatcccaagagcgctcccttgtttggcttttggaaagaagaaactgatattgcccatgctgctagcaaagtttgcacctgcaaaaccgcatagcaaagcgataacgataaatatcccaaaaggagtattcggattttgcacggcaattccgagccagacgcaaggaataatcaggattgcagtactaaaaaccgtccatcggcgtccaccgaatataggcaccataaaggagtagggaacacgcaataatgcgccagaaacggagggtaatgcggttaataaaaagagttgatcggtagtaaaattaaaaccgattttattgagattaacggtaactgcgctaaatagcatccagacacagaaggcaagaagtagacaactgacacttatccagagatttcttcgagcaatatgttttcctttattttcccagaaggccggattttctggtttccagtcgcgcaaaagataacgactatttttctcattttgcagtgccatattgttcctcacatgcacacattggtaatgaaaaaaagacaaaacacgaggtaaggcgcaatagccagttattagaattaaggatgaattgggtgaagtgctgattgaaagaatagataagaaagcgtaaccgcgggggcagaatggggattaagtagccagatatgtgttactaaatgtaactaacaagctaaccttcaaacggggttaatctttgaacgtatgtcatgtttcaacccttcagatcgtgaatctaaagggttacatattaactatattatcaacaagaccagacacttatagaattagtgatgatttattcattaaaaaggccaactactggaggaaaagcttctgtccagaaggtctatcggttcctctcttattgcctgattgtaataatcgttattacagtaagtattgtttatttcatctaaggtcatgtttttaacttttatattcatctggtttacaacttcctctgtcttgtaagtgtgtatattatatggggtatatgcttttttaataggatagtgaaacaattcgttatccacatctattccgtcagagtgaacttcaaatgcaccagggctaagaattgccaggccagtattaagcttaagtgctggggaaaacaaattaaataacatgagctgcatagtagggcaattgttcttcccagaaacatttaaaaaatttaagttttgctctgttttattatggggaataaagttccaatatcggatgtattattagtatcaatgtgggttattttattattgtccagtcttaaacttttgatagatggaagataagtcaggaaatcaagatttatatatttcaactggttgttagcagcgtttaatgtctgaacattgcagaagttgctatagaatattttaatttcagaaagcaaattgttgttaataagtaacgtattcaagttgggaaataagtcattgtgtaaacttgttagtttattatgggatagatccagcagtaagagttcatttttattacctgcaacaatatcagttaattgattatggctgagattcaggtattgcagccattcgcaagattctaattgcacaaactctagttgattatgtgccgcactaaaataagtaacactactaagcctatctatatcaatatttctgagagcattattattcatagatatatgtgtaatacttacatttctgccttgaggaaaatttatactctcaagagcattactattcagacttagctttacgagtctatcgtagttggttgcatcaaaatgtgtgaattggttattatcaagattgatagatgtgaagttttgcagccctggtggttgagtggttaaattaagtccacttaaatcaatggtcacttcattagtgtcatcaattatatttcttactgcagtccagtactgcatttgtgcaagtggatcattgttgatgccgttaactaatacatgccaaagatgtttactacttattagttgatcaatgtcattggttggcagtaaattgttattgcttaagtttaaatattccagttttgtagtgtttttggcgtttaaatgtgcaatatggttgtcgtttaaagtgattgttttcatcctgggatgattgtgtaatataaggtcagtgatcatattgtgatgggcacttaactcaatcagagattcttgccgcggctgccgttggcttcatcgttatagcctttaaaatcatattcccagtgaccaaaaccaatcatttgatcattgatttgcgtttctcctttaaagccgagacgggcataagttttatcaccatcgtcacgcttatcatcagtaaaataacgtagagcggtaaccttgccataaaggtcgagtttattaccatccttgttatagacttcggcagcgtgtgctacgttcgcagctaacaaaccagttacaaccaccgcaactatttttaatttcatttaacagaatccttttaattatcgttaaacgtattttctaaacgaattttaaacggcgtcatttataaatgacatactgtttttaaaatagaatggtgattaaaaacaatgagaaaaatagatgaaataatattatttatcgatatgtgatcgaagtcgaaatgagatataaggtgaattactggtatttgaaatttatttttttaatattgtcggaatttatctgattaactaccgggccgtagacccggcagttattttaaccacgacgtgtcgccagccagcagagcagggaaccgccgcagaccatcagcgcgccttgccagaagctgaagctcagcggggcgctgagcagcacggctgcaagcgcactggaaagtacaggcgtaaaatagctacctaccgccataatggtgacattgccatgcaatataccgacattccatgcagcataagcaaatcctaaggtaaatgccgcagagatgagtttaatcatgacgggcgtgctaaatatcatttctggttgtggcgtaagaaaatagtaaacccacagacttgctcccgttagcaggacaaaaacggtaattccattaaatccgcgtgcgtatttattcgttactgtgcaataggctgcccagataaacgcaccaatgaacgccaggaaataactcaatgggctggtggtgatattattgatgatttcatcataatgtaacccattgtcaccgcctaacacccaacagacgccgacgagggctaataataatccaggtacaatcaaccagttggttttctgaccattaaacagaatggcaaagagaattgtcaggctgggccacagatagttcaccatacccacttcaatcgcctgatgatgggtcgccgcataccctaaggaaagcgccagacagatttcatagctgacgaataacagactcccggcgagtaaatagcctttcgggatttgccgaatacgcggaaatccaaccgtgaagattaacagcagcccgcttaaactatagatagcagctgcgccgccgaccgggccgagcccctcactgacaccgcgaatcaatcctaccatcgtgctccacaggacgatcgctatcagccctatgagcgttgctttttgtcgtgtcatgctcgctgttttgtctctcttgccgttaaaaattaagctgaattttatagcatttttttaactggcctgtcaggcagtggtgcgtttttctaccgctattgaggtaggtcaatttgcgaaggcggattattttgtggcaaacagatgttctttttgatttcgcgcaaaaagattcagaattttactgttagtttcctcgcgcagtaatacccctgaaaaaagaggaaagcaatggacgtcagtcgcagacaattttttaaaatctgcgcgggcggtatggctggaacaacagtagcggcattgggctttgccccgaagcaagcactggctcaggcgcgaaactacaaattattacgcgctaaagagatccgtaacacctgcacatactgttccgtaggttgcgggctattgatgtatagcctgggtgatggcgcaaaaaacgccagagaagcgatttatcacattgaaggtgacccggatcatccggtaagccgtggtgcgctgtgcccgaaaggggccggtttgctggattacgtcaacagtgaaaaccgtctgcgctacccggaatatcgtgcgccaggttctgacaaatggcagcgcattagctgggaagaagcattctcccgtattgcgaagctgatgaaagctgaccgtgacgctaactttattgaaaagaacgagcagggcgtaacggtaaaccgttggctttctaccggtatgctgtgtgcctccggtgccagcaacgaaaccgggatgctgacccagaaatttgcccgctccctcgggatgctggcggtagacaaccaggcgcgcgtctgacacggaccaacggtagcaagtcttgctccaacatttggtcgcggtgcgatgaccaaccactgggtggatatcaaaaacgctaacgtcgtgatggtgatgggcggtaacgctgctgaagcgcatcccgtcggtttccgctgggcgatggaagcgaaaaacaacaacgacgcaaccttgatcgttgtcgatccccgttttacgcgtaccgcttctgtggcggatatttacgcgcctattcgttccggtacggacattacgttcctgtctggcgttttgcgctacctgatcgaaaacaacaaaatcaacgccgaatacgttaagcattacaccaacgccagcctgctggtgcgtgatgattttgctttcgaagacggtctgttcagcggctacgacgctgaaaaacgtcaatacgataaaagctcctggaactatcagctcgatgaaaacggctatgcgaaacgcgatgaaacactgactcatccgcgctgtgtgtggaacctgctgaaagagcacgtttcccgctacacgccggacgtcgttgaaaacatctgcggtacgccaaaagccgacttcctgaaagtgtgtgaagtgctggcctccaccagcgcaccggatcgcacaaccaccttcctgtacgcgctgggctggacgcagcacactgtgggtgcgcagaacatccgtactatggcgatgatccagttgctgctcggtaacatgggtatggccggtggcggcgtgaacgcattgcgtggtcactccaacattcagggcttgactgacttaggcctgctctctaccagcctgccaggttatctgacgctgccgagtgaaaaacaggttgatttgcagagctatctggaagcgaacacgccgaaagcgacgctggctgatcaggtgaactactggagcaactatccgaagttcttcgttagcctgatgaaatctttctatggcgatgccgcgcagaaagagaacaactggggctatgactggctgccgaagtgggaccagacctacgacgtcatcaagtatttcaacatgatggatgaaggcaaagtcaccggttatttctgccagggctttaacccggttgcgtccttcccggacaaaaacaaagtggtgagctgcctgagcaagctgaagtacatggtggttatcgatccgctggtgactgaaacctctaccttctggcagaaccacggtgagagcaacgatgtcgatccggcgtctattcagactgaagtattccgtctgcctagcacctgctttgctgaagaagatggttctatcgctaactccggtcgctggttgcagtggcactggaaaggtcaggacgcgccgggcgaagcgcgtaacgacggtgaaattctggcgggtatctaccatcatctgcgcgagctgtaccagtccgaaggtggtaaaggcgtagaaccgctgatgaagatgagctggaactacaagcagccgcacgaaccgcaatctgacgaagtggctaaagagaacaacggctacgcgctggaagatctctatgacgctaatggcgtgcttattgcgaagaaaggtcagttgctgagtagctttgcgcatctgcgtgatgacggtacaaccgcatcttcttgctggatctacaccggtagctggacagagcagggcaaccagatggctaaccgcgataactccgacccgtccggtctggggaatacgctgggatgggcctgggcgtggccgctcaaccgtcgcgtgctgtacaaccgtgctagcgcggatatcaacggtaaaccgtgggatccgaaacggatgctgatccagtggaacggcagcaagtggacgggtaacgatattcctgacttcggcaatgccgcaccgggtacgccaaccgggccgtttatcatgcagccggaagggatgggacgcctgtttgccatcaacaaaatggcggaaggtccgttcccggaacactacgagccgattgaaacgccgctgggcactaacccgctgcatccgaacgtggtgtctaacccggttgttcgtctgtatgaacaagacgcgctgcggatgggtaaaaaagagcagttcccgtatgtgggtacgacctatcgtctgaccgagcacttccacacctggaccaagcacgcattgctcaacgcaattgctcagccggaacagtttgtggaaatcagcgaaacgctggcggcggcgaaaggcattaataatggcgatcgtgtcactgtctccagcaagcgtggctttatccgcgcggtggctgtggtaacgcgtcgtctgaaaccgctgaatgtaaatggtcagcaggttgaaacggtgggtattccaatccactggggctttgagggtgtcgcgcgtaaaggttatatcgctaacactctgacgccgaatgtcggtgatgcaaacagccaaacgccggaatataaagcgttcttagtcaacatcgagaaggcgtaagggggcgaacagatggctatggaaacgcaggacattatcaaaaggtccgcaactaactccatcacgccgccttctcaggtgcgtgattacaaagcagaagtcgcaaaacttatcgacgtttccacctgtatcggctgtaaagcctgtcaggtggcgtgtagcgagtggaacgacatccgtgatgaagtggggcactgcgtcggggtttacgataaccccgccgatctgagcgccaagtcctggacggtgatgcgctttagcgaaaccgaacagaacggcaagctggagtggctgatccgtaaagacggctgtatgcactgtgaagatcccggctgcctgaaggcgtgcccgtctgctggtgcaatcattcagtacgctaacgggattgtcgatttccagagcgaaaactgcatcggctgtggttactgcattgccgggtgtccgtttaatattccgcgcctcaacaaagaggataaccgggtatataaatgcacgctctgcgtcgatcgcgtcagcgtcggccaggaaccggcttgtgtgaaaacctgtccgaccggggctatccacttcggcaccaagaaggagatgctggagctggcggaacagcgcgtggcgaaactgaaagcgcgtggttacgaacatgctggcgtctacaacccggaaggggtcggtggtacgcacgttatgtacgtgctgcatcacgccgatcagccggagctgtatcacggtctgccgaaagatccgaagatcgacaccagcgtaagcctgtggaaaggcgcgttgaaaccgctggcagcggctggctttattgccacttttgccgggttgattttccactacatcggtattggcccgaataaggaagtggacgatgacgaggaggatcatcatgagtaagagcaaaatgattgtgcgcaccaaatttattgatcgcgcctgtcactggaccgtggtgatttgcttcttcctggtggcgctgtccgggattagcttcttcttcccgacgctgcaatggctgacgcaaaccttcggtacgccgcagatgggacgcattttgcacccgttcttcggcattgcgattttcgtcgcactgatgtttatgtttgtgcgttttgtgcatcacaacatcccggataagaaagatattccgtggctgttgaacattgtcgaagtattgaaaggcaatgagcataaagtggcggatgtcggtaagtacaacgccgggcaaaagatgatgttctggagcatcatgagcatgattttcgtgctgctggtgaccggggtgattatctggcgtccgtactttgcgcagtacttcccgatgcaggttgttcgctacagcctgctgatccacgcggctgcgggtatcatcctgatccacgccatcctgatccatatgtatatggcattttgggtgaaaggaagcattaaagggatgatcgaagggaaggtaagtcgtcgctgggcgaagaaacaccatccgcgctggtatcgtgaaatcgagaaggcagaagcgaaaaaagagagtgaagaagggatataatctcttttgaactttaagctgaaaatggcgctgtaaaaggcgccattttcatattgtagacaacgtaggctttgttcatgccggatgcggcgtgaacgccttatccggcatgaaaacccttcaaatccaatagattgcagtgaacgtgtaggcctgataagcgtagcgcatcaggcaatgttgcgtttgtcatcagtttcaaatggcgctgtaaaaggcgtcattttcatattgtagacaacgtaggctttgttcatgccggatgcggcgtgaacgccttatccggcatgaaaacccttcaaatccaatagattgcagtgaacgtgtaggcctgataagcgtagcgcatcaggcaatgttgcgtttgtcatcagttctaaatggcgctttataaagtgccatttttttattgcgtaaccagacggcgtaatcggctcacatccactgttttttctgcctctgccagactccaggcgttttgcagattcagccacatttgcgggctactgccgatcaccacggaaagtttaatcgccatttctggcgtcaaagctgcttttcctgtcagcaatcggcttgccgtactgggagcaatttccattgctctggcaaactcgcgcaggctgacattaagttcgtccagactttcctgaataatgtcccccgggcggggatgattggccattttcattagtgtctttactctcagtagcgttccttcactgggaacactatcattattgttccttcctacgcaacaataatccatttagccatttcatgttggagagtgtgcgatgctgcgacccgaacatggcagtcgcagcaaaggcctcttagtgacggaaatcaatcaccatgcggccacggattttgccttcttccatctcagtaaagatggtgttgatgtccgctaacggacgcagggcgactttcggcaccactttaccttcggcggcaaactggaaggcttcagttaaatcctggcgcgtgccgaccaggctaccgaccacttcaataccatccagcacaagacgtgggatatccaggctcatagactccggcggtagaccgacagccacaacacgaccgcctgcacggacagcatcaactgcgctgttaaacgcagctttagctaccgctgttaccaccgcagcgtgagcgccaccagttttctcctgcacaattttggcggcgtcttcggtgtgactgttaatcgctaaatctgcgcccatttcggttgccagttttaactgctcatcattgacatcaatggcgatcactttggcgttaaagacattcttcgcgtattgcagggcgaggttacccagaccgccaagaccgtagatagcaatccactgccctggacgaattttactcagcttaacggctttgtaggtggtgactcccgcacaggtaatgctgctggccgccgcgctgtccagaccatctggcacttttaccgcgtaatcggcgaccacgatgcactcttccgccatcccgccatcaacgctgtatccggcatttttaacactacggcagagcgtttcgttaccactgttacagtattcgcaatgaccgcatccttcgtagaaccacgccacgctggcacgatcgcctggttttaaactggtgacacctggacccacttctgccaccacaccgatgccttcatggcccagaattacgccggttttgtcaccaaaatcgccattcttaacatgaagatcggtatgacatacaccacaacactccattttcagcagggcttcgccatgtttcagactgcgcagtgttttatacgtaacgtcaacatgatgatccttcgtaacaactgcagccttcatagttcctccttttcggatgatgttctgcatagcaggtgaggcaaatgagatttattcgccactacccagtatggatgagatctgaaaaagggagagggaaatagcccggtagccttcactaccgggcgcaggcttagatggaggtacggcggtagtcgcggtattcggcttgccagaaattatcgtcaatggcctgttgcagggcttcggcagaggttttcaccgccacgccttgctgctgcgccattttgccaaccgcaaacgcaattgcgcgggagactttctgaatatctttcagttccggcagtaccataccttcgccgttcagcaccaatggactatactgcgccagcgtttcacttgcgctcatcagcatctcatcggtgatacgactcgcgccggaagcaataacacccaggccgatgcccgggaaaataaaggcgttgttacactgggcgatagggtagattttatctttccataccactggattaaacgggctgcccgtggcgaccagcgcgttaccttcggtccaggcgataatgtcctgcggtgtggcttccacgcgactcgtcgggttagacagcggcatcacgatcggacgcggacagtgtttatgcatctcacggatgatctcttccgtaaacagcccggtctgtccactgacgccaatcagaatatctggttttacattgcgcaccacatccagcagactcagcacatcgctgtcggtatcccagtcactgaggttttcgcgcttctgcaccagtttggtctggaaaggcagcaggttcggcatcttgtcagtcagcaagccaaagcgatcgaccataaagactttctgccgcgccgcttcctcgcttaatccttcgcgctgggtctgggagatgatcatttcggcaatgccgcatcccgcactacctgcgccaaggaagacgatttttttctcgcttaactgaccacctgccgcgcggcttgctgcgatcagtgtgccgactgttaccgccgcagtgccctgaatgtcatcgttaaaagaacaaatttcattgcgatagcggttaagtaacggcatcgcatttttttgagcaaagtcttcaaactgcaacagcacgtctggccagcgttgtttcacagcctggataaattcatcaacgaattcatagtattcgtcgtcagtgatacgcggattacgccagcccatatacagcggatcgttaagcagctgttggttgttcgttccgacatccagcaccaccggaagggtatacgccgggctgatgccgccacaggcggtatagaggctcagtttaccgatcggaatgcccatcccgccgatgccctggtcaccaagccccagaatgcgttcaccgtcagtcaccacaatcactttaatattatggttcggcacgttttgcagaatatcgtccatattgtgccggttctggtaagagataaacacgccgcgactacggcggtagatctcagaaaaacgctcacaggctgcgccgacggttggggtataaataacaggcatcatctcatcaagatgattgtttaccagacggtagaagagggtttcgttagtgtcctggatgttacgcaggtagatgtgtttgtcgatttcggttttgaatccctgatactggatccatgctcgttccgcttgttcttcgatggtttcgaccacttccggcagtaaccccagcaggttgaagttacggcgttcttccatgctgaaggcactgcctttattcaacaacggaaattccagcagtacagggccagcgtaagggatataaaggctacgctgtttttttgtttttggttccatgtcactcactcttttttgaatatccatccctggggggcttttatcgtctttgctttaccgccagggcgtcggcctcaagtataaagcagataaaaacaaaaacaccattgcgcaggcaatggtgtttaatcgtcattgaggactgatggttatgaattacttttcagcggggcgttttctgccggttgggttatttactacgctggatttgtcaccttcggtaactattttgcgctggttagaaattttatggtccagtccaagaatatgacgtgcctgacggttgcttttcattttaactcctcaatcctgtagctagttttaaggacaacatcgccgtagcgaagaaacacgtgctaaacccctaaattaggttgccgatcaagcatagcaccttaaagcgtagggtgctggccactgaccacataattgatcgtttgctggtagatatcactgaggatgtcgttatcagaagcttcaacccatttggtcagctccatgagaatgtcatcttcagtgacaacaccatgctgtgcccgaaggccttgctcaatggcattaaccagagcgggttctgctgtactattttctgcctgataataagtaaacatagtgattctccgtgtctgtgtatttatggtgtctgctacggatcgcagatttataaagcacattcagcatggcaaatatttgccgcttcgttgttaagattagtcctggttgatgatttttatattttaacaccatgatattcatagggattgtgattggtatgatccgattaatattgatacaatatcttttgggttatatattcccggtaatctattgtgggaatttaatttaagtgcagaagtaatattttcgccggattttattcggaatatcctgcttatcctcgtgctgtttctcacgtagtctataatttcctttttaagcccacaggagagcaacaatgacaatccataagaaaggtcaggcacactgggaaggcgatatcaaacgcgggaagggaacagtatccaccgagagtggcgtgctgaaccaacagccgtatggatttaacacgcgttttgaaggcgaaaaaggaaccaaccctgaagaactgattggcgcagcgcatgccgcatgtttcagtatggcgcttagtttaatgctgggggaagcgggattcacgccaacaagcattgataccaccgccgatgtgagcctggataaagtggatgccggttttgcgattacgaaaatcgcactgaagagtgaagttgcggtgccgggtattgatgcctctacctttgacggcataatccagaaagcaaaagcaggatgcccggtctctcaggtactgaaagcggaaattacgctggattaccagttgaaaagctaaagcattgccggatgacgcgtcaggcgcgtgaatgcctgatgcgttgttagcatctttacagcgcccgccagcaccggagctcacgtccgtcctcccttattgctaaactttgccggacttcacatccgtgggttgccagcgggcaacgttcgtagaaaaaacagccttgcggcaacgtgcggtttcccggcagatccgttttacgtaatgcccattcttcctccagcggtttatcaatggcggggagggaatccagcaataatcgggtgtatggatgtgcaggtgccgtcagcacctgctgcgcgtcgcccagttctacaatctgcccgagatacatcaccgccacccgatcgctcatatgacgtatcacgctgacattgtgactaatcagcacataggtcagcccgtgattttcctgtagcgttaccagtaaattgaggatctgcgcctgaacggagatatccagcgcagaggttggctcatcaagcacaatcacgtcaggctggctagagagtgctctggcaatggcgatacgttgccgctgcccgccggagaacgcatgaggcaggcggtcgagatactccggacgaatacccacctgcacagccaactcctctgccaacgctcgccgctgttgttcactactacgcttagctatccagagcggttctgtgatgatgcgccacaccggtaagcgcggattaaggctagagagcgggtcctgaaacaccatctgcataatgcgttgactgccagaacggatgtactgcccgtggctcggttgcagcatacccattaaaagctgtgcgagggtgcttttgccgcagccactctcgccgacgatccctaaggtttcaccacggcggatctgtaaatcaataccattaatggcatgaacatgttccgtagttttaccaagccagtttttacgggccgggaaattgatatggacgtcgcgtaacgttaataacgtgtcagacacttataacctcctgctgcggataccaacaggcacagcgctggttgttgtcaccacacgctgtcagcgccgggacgttttcacactgtgcacctgccgcatagcaacgatcgcgaaaagcgcagccgtcaggcaaatgggtgaggtttggtaccgtccctggaatggcgggtaatagctggcgtggtactccatgttctggtgcgcattgcagcaaaccaatggtatacggatgccggggatgatggataacgtctgccgtcacgccgctttcaattacgcttccggcatacatcacgtaaacgctatcgcacagttggctcaccacggccatatcatggctgatgaacagaaccgcagttccactggcgcgggctttatgtttaagcaaacgcagtacctgcaactgcaccgtgacgtccagcgccgtagtcggttcgtcggcaataatcaattgcggctcgcaggagaatgccagcgcaatcattacccgctggcgcataccaccactaagctcaaacggatagcggctcataacttccacggcatccgggatttgcatctcttccagcaggtcaatcgctttagctctggcttcccgacgacttattggttgatgatggcggatcacgtccatcatctgaagacctattcgacgtgtcggattgagggcggtcatcggttcctgaaagatcatcgccactcgtgcgccgcgccactgacgaagctgtttttcccgcgcgttaagaacatcttctcccagcagggaaatctgcccccgatgtacgcaataactgcccgtcggtagcagacgcataatcagcattgcggtgacacttttaccactgccggattctcccaccagaccgacaatttcaccgcggttaatctgcaaggacacattgttgagcgcgtgaacatcaccgttaaaaccggggaaactcaaatgcagttgttgaatgtccagaacgggttgggtcatgactgctttcctcctgctttttagttcaactctgctttcctcctgctttcgggtcaagcagatcgcgaataccatcaccaaagagattaaacccgacggcggtaagcaaaatcgctgcccccggaaatgcgcaataccaccactgatcgagtacatagttgcgaccatttgctaccatcgcgccccattcagcactcggttgttgagcacccaggccaataaatcccaacgtggcggccattaaaatcgcgctaccgatatccaggcttgcctgcacgatcagcggcggtagggagttacgtaaaatatgccagttgatcagatgccaacgagacgcgccaaaggttttcgccgcctgaacataggtatactggcgtacaactaatgcttgcccccgcgccaggcgcacataaaagggaattcgcacaatagcaatagccagcatggcgttaaacaaactcggcccgagagcggcagccagtgccattgtcagtaccaagctaggaatgctcagcataatgtccatgatgcgcatgatgatggcgtctgcgcgtccaccaagcacaccggatagacatccgagtaggctaccaatcatacccgcaatggcaaccacgactaatccggcgagaatactttgctgactgccgaccagtacgcggctaaacagatcgcgtcccacttcatcggtgccaaaccagtgcgccgcagaaggcggcaaaaggcgggcggttaaatcaatggcgttgggatcatgcgtcgccagccacggactaaaaatcatcatcaatagcattaatacaatgatgactgcgctggtcacggtgagcggactgcctttcagcatccataccagttttgcaccgttaaatcgcgtttgtttttgtgggcgtacggcggacgtttcctcgcttagcatcattcaccacctccacgtccgatacgcggatcaatccacaaatagagcaaatccaccaccaggttgaccagcacataagcaaaactaaccacgacggcaaagcccatcactgccgggaagtcgagcgcctgtatacttgttactacccatgcacccattccgggccaggcaaaaacggtttcggtgagcactgcgccatacaacaaatcgcccagcgccaaacccaatacggtaatgcttgggatcaacgcattgggtagcgcataacataaaacgatataccagccgggcaagccgctggcccgggcggtacgaatgtagtcttcactcaattgttccagcatcgcactgcggatctggcgagcgacaattcccaggtgaacgaacgccagcgttaatgccggtaagatgagatgttgcaacgcattgaagaagacttcaccgttgccttcaagcagcgcatcgagcagataaaagccggtaacgtgcgttggtggatccagccagtcatcaagccttccgccgccgggaagaatttgcagatgaccataaaacagcacaatgacgcccagcccaagccagaacgcaggtgtggagattccggtaatggccattattcgcaccagatgatccagccagcgatttcgccagactgcagagagtatgcccagcgggatgccaatcaggagtgccagcagcagggcaccaaaagccagctccagcgtcgccgggaaaaatatacgcaactcttccagcaccggacgcccggtacgaatggatgttcccaggtcaccatgaaacaggtcgctgacgtagcggtaaaactgtacatacagtggctggtccagtcccagttgctggcgaatattttccacgatagcatcgctggcgcggtcacccgccagtaaccgcgccggatcaccagggatcagatggctgataataaacgtaatcacgcagacgcccgccaccacgagcaccagcccccagcagcgttggcgtaaaatactccagaaggtcacgttatttactcatggtattgatattgaagacctgttccagcatgggattgaacacaaagcctttcacctctttgttcatcgccagttggtagtttttctggaacaggtacacataagcagcgtcatcaatgacgattttctgtgcctgctggtagtcccgggtacgctgcgtctggtcggtggtcgcaagcgcattgcgcagtaacttatcgacctcactgttttcatagaagctgcggttacccggcagaccttttttgtcactctcaaaccagtaattcataaacatatacgggtcggcaaaatccggactccagttgccaatcgcaatgtcgtaatcacctttacccactctgtcgcgcatggtggcgttcgccagcttttccagcttcacaatgatgcccagcttgttgagactggattgtgtcgccagagcaataggctcccagttcggatcgttatcggagtagagaaacgtcaggctggtgggtttgctcgtcactttatcccattcggctttggctttcgtttcgtcatggttgtattgcattgccgtcgcatcgtagccccacatgccttccggaatcgggccgcgcatctgttttccgttaccactcagaatgccgttaaccatgccctgataatcggtagaccaggaaatggcccgacgcagatccgcctgattaagaggcgctttgctgttattcagatacagataggtaacgcgcagactcggatactctgccacattgactttattttcctgcttcagggcgttgagttgatccaccggcagcgcatcggcaatgtcaatgtcgccacgggagagctgcaggcgacgggaggcactttcaccaataatttttacgcttacccgtttgaagttcggtttattgcctgggtaatgcggatttggcaccagaactaattgctgacctttttgccagcttttcagcataaatggtccggaaccggcggtattttgcgcgaggaagccgcgagcatcatccgctgcatgttcctttaagaccgccggattgataatggatgcaccgtcattcgccagcgtgtagaggaacggtgcgaatggttggctaagggtaaacttcaccgtatgttcgtcgggagcatcaatctttaaatctttgggaaatgcttctgctggcccctggccgatttttagtagccgctcaaaagaaagttttactgcttcggcagtgacaggtgtgccatcggcaaatttagcattatctttcagggtgaacgtccactctttttgatcgtcagacgctttccagctacttgccagatcgccttcaacgtcggtactgcctttatcaccgtccgttttgtactgaaccagccgctgataagacgggtaggtcactgtccagtcgttattatctattgttaccgccgggtcgagggtttgtggatcggcggccttaccaatcaccagcatatcttttggtacggcggcgtgcgcaaccgggaaatttgtggcaaggacgagcgcgagcaatgtgggacgaaagcttatgcttctcttcatgacagtttcctgattaactgacgtgctgtgtgccaggggatataaaacaagagaattgatcagcgagcagagggtaactcgctgcctggggtaattcgaagtgccaccattcgctggagataccgacaaaaccgccaccagtcattatcgcattcagcaacagccgattgcgctgagcggcgggcgggacggaagggtgataggcatgggagcgctcgtgcatttcatcgaaccctgcgcccatatcgaggatgttcccgtgctcatcacgaagcgtcaggtcgatcgccgtgccacggctgtgattagaaccgaccgtcacatcaacaacatattgcgggtctgggcaggcttgccacaacatcgcctgtgcttgttgtgggcgatacgcatcgtaaatcaccagttgtaacccactcagctgggcgatgctgatacttttcgccagcgcggtaatcgcatccttgtgtaacagacaacgcgcttgctgataaatagctttacctgtgatgttatcagcgcaggcgtatttcaattcgatctccagatcagggaagattacggctaaatcaaccagttcggtggtatcgctcataaacggttcctgtataagacaaaaattgctgcgctttccgcttatgcagatctcatgccatgccgggataagcgccagaatgctggcttaaagttatattttttaacttttgatcaacatttgtgcagcgtagtgcagttttggtgcaagaggggaagttaaggaaggaatctcccggaatcgtagctgaaatcacagtatttaagtgacagtgtcacgttaaatgaaaacccgcgagtgcgggcgagaggaatttgtcagattttcagcggtaacacgctgctcatccagcctggaatttcttcggcgggtagggggcgggaaaagaaatatccctgaataacgcgacagtggatcttgcgtagcatctcaaattgctctttggtttcgacgccttccgccacgacggttaaattgaggctttgcccaatgctggtaatggcttcaagtaaggcaaggatgcgtttttcggtcagacaacgatcgacaaaacttttgtcaattttgatttccgttaccggaagactgactaagcgggataatccggaaaagcccgtaccaaaatcatctacgcttaagcccacgcccatatcacgcaggatctgaatgcgcttaaagatttcggtatcgtgttccatcatcatgctttccgtgatttctaccgtcagctggtggccgtcaataccccaggcgtgcattgcatcagacacctgattaggcagttgattactgcgaaagtgcagcgcgctcaagttcacggataacgccgggatatgaatattctggctacgccattctgctaactgacggcaagcttccgcgatgacccagcgcccaatattttcgatttcaccaatctcttctgcgagaggaataaaccgactagggggcacatgaccatgcaggggatcgtgccagcgagcaagggcttcgatgccgtacagttcacccgtttctgcgaagatttgcggctggtaaaccagtttcagttggttattgctaatcgcttctttcagcgctgcgcctaaaaccaaacgctcttttaccatttcgttcatcgccgggctgaagaactgccagccgttaccgccattcttgcgaatataatccattgcattgtgagcagtggagagcaagtaatcgcggtttttacccaggtcgtagctgatgccaatactcaaggtaagcgggaagggtttatcgtcaatcattatcggcttgctgaccacattccgtagctcatcggcgatttgggtaatgttactgacgtcgttttcgaggctcacgaggacaaactgcgtaccttcgatacgacagagatactgatccggtttgagtttttcacgaaagcgattgaccacttccagcaatgcctgatcggcccacgcatagccaaggctatcaatcacatcctgaatatggtcaacaccgatgagatacaccacgggagagacggctttgtcgaccaggtcatcgaggtaattgtgcaggttattgcgatttggcagaccggtcatcggatcaaattggatgagttgttcaatatgctgacggcttttttcctgttccagcgccagcgcggccatatgctggctgatatctgccacgcgttcgataaaggcgctggtttctgctccactgctggttttaatttgcaggatccccgcaggcgcgccatcacgctgacgaatggtcgcactccagctttgcgcattttgaatttctgcaccgtgggaagaactcgcccagtgtatcggcatcccgttgcgcagtgcgaacaggctaacatggctttcgttgagtacagattcgatgttacgacaaatgatttcccccatttcatgaaatggcgggctgctgcacatggcggcgagaatattgccttcaagctggcgaatctgccgttcttcggtgatatcgctgaaagtcattaccaggttctgcagatgcgcgagcacgtcataaaccgggctgatagaggctttaatccagattttttcaccggtgcgcgtcaacagcagaaattcgtcctgatcgcgggcggttttccatagcaactgttgtaaacgaatgcggttatcggcagggaattcaggaatgttcaggagtgtatcgggctgcataccgctggcttcgctaatgcagtaaccaaacatttcggtaaatgcgcgattgcactgcacaatatggcgttccggatcgaggacaatcaccggtcggtcgagatggtcaacggcaataatcaattgtcgggtctgttctttttgcgccatttctacgctggcatcccgtaccagcgccaggtaataaactttcccctcggcgctcactttgcttagcgcaaaacgggtccagattttactgccgtcttttttctccagctgcagctcccgactcatcccctcaacacgcgctttaccgccttcacggttgtgacgaatgtattcaggatgcgcaggacgcaaatcccgcggaatcagcatatcaatgttattgccaatgacttcttcacgtttgtatccccagagcttctctgcggcggggttgaaaaacatcacttcatcattttcgttaattaacaccgcacccatcatattttgctcaagggcggggaaaaaaatgccatcggcggcattatccgcatcggttagcttcatgattacctctgcatcctggcgcatttaaagactggctttccagagttcaacacggtttctacctcgtcttttggcgatatacagagcttcatcggctatttgaatgaggcgctcatagtcaggatgaccattaaacatggcggcaccgatggaaagactgagggcaatatcttcgccgtttgcggctttcagtttggttttctccacccgactgcgaatacgttctgcggtacgtaacgtttcgttttcagaagcttcagtcaaaacaatgataaattcatcgcccccgtagcggaaaacataatcactactgcggacgttgtcataaaaggcctgagagactttacgcagaatttcatcaccagtgttatggccccacgtatcgttgatctctttgaatttatcaacgtcaataatcagcacactcagcggtgtaccggtccggttggcatgggcaatttcgcgtttgaagatagtcggtaggaaacggcggttaagtaatttcgtcagtacatccataccgacttcgtggcggcttacttcttcaaacaattcacgcagcaaggtaataatttggcttacggtatttcttatctgtaataaaaatttcacccgcagacttctgttattcaaatttctggtgttacgcatggtttgattgaaaataccgtcgaaatcctgaatcagacgggagatatggcctacttcggcaataccactaaaataatgtcgacctttatggttaaaccacaggccaaaatcagcctggcttaaaggcaaactactgcctaaatcagaatccagcaggattttatagataatatctatttcccaactaagtatactggctatttgccgttctttttcttcttcggcgttttccagtaagctgaagatacgatagttttcatcttccttactggcactactgtcactaaaggtaaacgcgcgagtcatcacttccatcgcgatatcaatactgttaatgctgaaatggtagacctgaagtttttctgcggcggaataatcgctagagaagatcaccggatagaggatttttttcagcacccgaaaccccatctcgacaatttctaccggaattcctatgcgggcatgcacttccgcgacggtatgctggatttgtattagcctttcgacatcgtcaacctgggcagaaagcacgttaataatccagcgttccatcgcactcttcaactgccgctcaacttgttcattactcaagaattcttcggcatgcgggtcgatgcggacaattcgataaaactcgatactcagataatgagcatgcgcaacggcaatttccgcggctttagcacgaatgggcggatctgcctgttcgacaagtccggtccactcatctttcattcttttaaaatacatctccataattcacacccttataaggctgggaaatcagacggaatcaaaatgaaacgcaacgtgcgagatcgactaactgcaccatattctcctgaaatatgaagatatactgaaaagaaataagcgatttaggacagtttcaatctacgctactgttcttcagaagagtatagcccatcgtaattatttttcggtgacagcgaatatcgtatggtttttcatattcatacatttttattagggatttatggctgtttaactaagtgtggttaatttgacttaagtaagcatgattattagtgggatagtttaagagggtaacaagccggtgggtaaagcaccggcttgttacaaagtaagaatgggagtttaactgccccagcgactttgcagatagctgaccgcttgttgagtctgcggtttattcagatagtcctcacggaacaagatggtgccgctaatttcgggcacagcatcgttaagatcgagctgctttttcagttccggtacgccgccgttaatcatccagtctggctctatcttactaggttcacccactttatagaaggcgataccgatatacaggcgggtcctggtcggtttaacgacatccgcccaccattttgccaacacgtcataacgcgcggcactccgactgaacggccagtaaatttggggagcaatgtaatccagcaatccttgttccacccatcgacgggtgtcagcgtaggattcgtcataggctgccgcgcctcgggtatcggaaccgagcggatcgtgacttcggttacgccacacgcctgccgggctaacaccaaattcgactcccggcttaatgcttttaatggtgtggcttacctttgcaattaactgctgagtattgttgcgccgccagtctgctttactcgcaaatgcgcctccgtatttacggtacgtttcgttatcatttagccgactacccggactctccgtatagaaatagtcgtcaaactgcacgccatctacgggatagcgggaaaccacttctgcgactatacttgtgatccagtcctgaacctcagggatgcccgggtcgaggacaaagcgatcgccagacgttctgatccagtcgcggtgttgcacatagacgctcgccggttgttgagacagagtgctattcagttccctgatagtaccgggcttcgtattaacgcttacgcgataggggttaaaccaggcgtgtactttcatcccacgcttgtgggcttcgtcgagcataaattgcagcggatcgtaacccggattttcaccaatcttaccggtcataagatcggaccacggcaaaattttgcttggccacagggcggtaccgtccggcttgacctggaaaaagaccgtgtttatgccgagacgttgcagatgatccagtttgtcgatcatcgcctgttgttgtacacgggcccggctggtggggttactaatgttaacgctggaaaccggtggccagtcgagccgagaaaccgtggccagccagatgccacgcatcggttgactgctttgttgcgtcgtggctggtggcttactacctgctggtggtgtcaccatggactctggaggcgtgcttttacaactacacagtaaaagtgccagtgcaactagtatcgctggtcttctaatcgttaatttcttgtttcgggagcagatatccatatgtgctggtttccggtaaacagatgtgcgctcattctcgtacttatccccgttaagtcaatacgacagcaagcacgaaaaagggagcgatgaattatcgctcccttgtcttataaccattcagacatggttagtgtttcttgtcattcatcacaatatagtgtggactacgtgcacgcgggtgcaggaagaagtgaccttttggtgcgttctgactgttgattggctccagagtgacgccggtatttgctttgcctttacgatcatgaacagcatagagaataaagggcagggcaagtaccaccaggaaactaacaaccagtaattcaacatacatatcggtagaatcaccctggatgttatccggcggcaggaaggaaacaataaacgccataatactagtcagcagaccgacaattgccacgaccagtttcacccctttaccaccagggatattaaatgtgcgttttaagtcaggatgtttaagaaccaacacaatgtagccaataaacagcatgaaataagcacacagataaatcaccaccgtcagcgccagtgcgatcaggaaggacatgttgttaccgccaccggtattggtgaggatgatcaacgcgatagacgtaatcaccagctggctaatgaccagcgttaccggtacgccatttttgttcattttagcgaatgccgctggcagcaggtttttctgcgctgttacatacatcccgcgagaaggaccaacaatccaggaggcgatttccgccagaacacccagcaacagcagtgcggagatcacgcgaaccgtccactcaatttctggtgccacatgggacatcagaacggtaaaggtttgcattacccctgcggagaggttgatttcattacccggaatgaccatcgcaatagacaaaccaccaacagagcttaagcagattgccgccaccatcagcagtaacatagccaacggatagtcgcgccctgggttgctcatttcattgacgtgggttgcggatgcttctacgcccatataactcaaaatgaaggcaacaaatactaccagggtgcccactttagagaagtcagggaagaaggtcttgctatccatttcgatagcaacgggggcaccggagtgcagataaatagccgctaatgcgatcaaaataaatgcaggtaacaggataccggcgaagaagccaactttagcaattcgcgccgtgtatttcgtgccaccaaactgcgttaatgccagcgcccaaagaatgatgagtgctgcaatagttttggtaatggggtcttcattcagcgctggccatttcaggatgtaggagagtgcccctaacacgaaatagagcatcggaataaaaccaatggcgatttgcagatagccaaaactgatcgctgcaaatccccatctcggccccagagtattacttacccaggcgaagacaccaccttcttcccagccgtcgacggtggccatttccgcagcacaaagtcccacgggaataaaccataaaatcccgcctaatagcaggaagaagactaaactaaagccgcttgttgcgaaggtagggtattcataaacagccattaccatgcttgccgttatggcaaagaatccaagtaatgtgagctgcttagctttacctgtctgtacacttgtagccatattatccccctaaaacggtattcctgtcggaaccgcacctgttttgttctgaagcgtattcagaacaatattttccgttgctaatgccagtgaacagactttggaaattgtcccgaaacgggttcgtttcgggacaccgttaccgttaaacgttatcaggtatgtttaaagctgttctgttgggcaataccctgcagtttcgggtgatcgctgagatatttcagggaggctttgtagtcttccagcaacagttcagcaaagtccatttcgaagccgcgacgacacataatgcgcatcaccacgatgtcggtggcttcaccgccgagagtgaaggccggaacctgccagccgcgcagacgcagacgttcagagaggtcatacagggtgtatcccggatcttcaccatctttcagtttgaagcaaaccgccgggatgccttcgtccgggcgacccgtacagatgaactcatacggccccagtttggcgatttcatccgccagataagcggcaacctggtaagaggcgttctgtactttggtatagccttcacgaccgaggcgcaggaattcatagtactgtgcaattacctgacccgccgggcgggagaagttgatggcaaaagtaccaatttgaccacccaggtagtcaacgttgaacaccagttcctgcggcagcgcttcttcgtcacgccagataacccagccgcagcccagcggagccagaccgaatttatggccactagcactgatgcttttcacacgcggcaggcggaagtcccagacgatatccggggcgacgaacggtgccaggaagccaccgctggcagcgtcgatgtgcatgtcgatgtcgataccggtatcggcctggaatttatccagcgcatcgtgcagcggttgtgggaactcatagttaccagtgtaggtcacgccgaaagtcggcaccacgccgatggtgttttcgtcacaggcttcaatcatgcgtttcgggtccataaacaactgaccggggcgcatagggatctcacgcagctccacatcccagtagcgggcgaatttatgccagcagatttgtaccggaccgcacaccaggtttggtttatccgttggtttgcctgcagcttccatacgcttgcgccaacgccatttcatcgccatcccgccgagcatacaggcctcggaagaaccaatggtgttggtgccaacggcctgaccatttttcggcgcaggcgcatgccacagatcggcaaccatatttacgcaacgcaggtcgatggctgcggattgcggatattcttctttgtcgatccagtttttgttaatggataaatccatcaatttgtggacattttcgtcgtcccaggtctggcagaaagtggccaggttctgacgagcgttgccatcaagatataattcgtcattgataatctggaatgcgacatcgtcgcgcatttcgtgcagcggaaaacgtttactttctgcgatagtggaaatagacttcgcaccaaaacgactatcgagtagttcgctccttaaatccgttacttgcttcttatccattttaaactccttaaaatgattggatcgcattaaaaaagtaggatttatcgataaagtaagcaagtgcaaaggactcgtgtttaaataacaaaatcctaatgttatttatcgtgagatattacgcgaataatattttttcattgaaaaacaatacaatatgaaattcttgggtggtggtaaggtgttttatgctgttatttttatgcgcattctgtgtctcctgaattatcacgtaaaaatcagaccttaaaatatcactattagtacttgattattattttgaacgcatttataaaattattacataaaaatagcgaatattgctaaaatccccgccaacgatgtgttgacggggctgttattattttggcaataatactccggtataagtatttaccggatgagaaagatattgtttaacggcagtgttaacattctctaccgtcatttgtttcaacaattgctcctgctcagtccatgctgcaggatcgtcatattgaataagactatttacaatagtgttcgctaattgttgaacgctacgctgttggatatcgaggctgcgctgaacgttttgctggtattcattcagttcttgctcactgatccctttagccagacgcttaaccatcacttcattcgctaacgttaacagttcatcatgtcgttctggttgacaagtaaaagccagcaaatgactgatatctttggcctgaggatcaacgctgaggcgagaagaaacgctgtatgctccagatgcctgttcacgaatattaacacgtagatcttttgccagtgcgacgttaaaagcatcgagcgccatacgcgtcggcagattaacaggtgtccgggaatcataacgcttccactgactaacctgtgccacaggttcattttgttcttttacagtaacgcttgcgttgtccgtcgcgcgagttaatggtttacctgcggctaatgggctatcagagtgtttgatacttcctaagtaacgcgtaattaacgccacgagtttgtcttctgcgacattaccgacaatgacaaacgtgatatccgctggagaactaaacaattggcgatcggcagccagcgcatctgcggcagtaaactgtgcaatctgattttcttgcagtaatttcgtgcggtcatcagcatagcgcgtctcatacatctgctgggcgaatttctccgctggacgctggtcgagcgttttcaacgcctgaatttgagcattttgtaggcttgcccaaatattatcgttaatcgtgctgtgggtgattcgctggttaatcaactgaaaaccaggttcagggttattagtccgcgcgctaacggagagcaacgtattcatgccactgactttactgctcatggttacgctattttccgcactccagcgtttcaggctggaagaggagagttcgccaacgccgcttccgctaactgctttatttgccagcgcgataagacttttttgctgcgcagggaaacttaaatcgcctttattgcttacggcaataatttgtagcttttgctcttcacccgcggattttgccagaataaccctggcaccattggaaagtgttaaacttgtcagattctccgccagcgtttctttgctgctaatttccgcctgtgggtctgcgtctactgttaagcttaaatttctgcctgggaagacgtaagccgccagctttttgttggcgtactccttttccagcgccaggatagccgcaggagacaatgcttttttggcggcaacctcattgtttaccatttgctcccaaaatgcgtcctggttctttcttaactgctgccatttttccgccagactttgcacggtaatttgctgccacagacgtttgctaagttgatatgtctcttccgggctcaagaacggcgtattatttaaactgctggatgccaggcgactggtcagcatacgtaaatcacgttcagcttgctgatcaaccgcatttttcagccaggtgaggcgggtagatttgacatcatcgagttcttcagcagaaaaaccatgctgatcaatggttgccaactctgccattaatgcattcgcagcatcctgcatattatcgtctcgtgcatttacacggaaaaacaggctctgataatcgggtgcaattttaacgctgcgcgcagtgccgccagaaatagtcttcaactcgccgctctgtatgcgttcctgcagacgttgattgaacagctgaactaacatgctccattcagcttgttcgataaagctttgctcatcgttcacttgtaccattggcaggcgataatagagtgcgatgccgttcacccggttttctttatcattaatgatattaaagcgcaggtggttttcggcttttgtcggccagacgcgattttcagctgctttgttagccggaagcttacttaaattatcctttatcagcgccagcgcttctttactgtcgatatcgccgaccacgataaaggtcatattatttggttgataccagcgttgataaaattggcgcaattgtgccggtgtgaccgtggcgacagtatccatcaggccgataggttcacggtctaaattacgggtatttgccagcaggaaagggcggcgcgcctgagaggtgcgccatttcgcatcctgatgggcacgccattcctcagtaattacgccacgttcagcgtctacttcgagtttttcaaaggttgcggcattactccattcactgaagattgccatcacttgttgcagattttgtttctgcgtagtcggcaaactcacctgatacaccgtttcgtcatagctggtataggcattaacatcgcgaccaaaacgcaggcccatactctcaaatgtttcgatgactttattacccggccatgtttttgtgccgttaaacatcatatgttctacaaaatgagccacgccgagctcattgtcttcttcctgcaaactaccggtatgaatttgcagccataaatttacctgatcctttggatgagcatgcggataaatcatatatcgcaagccattgtccagttgcccggtaattaacttttcatcctgcggtaaggcggcggcaatcagccgcccggggagcaacagagttgccactaacgtcagtaagaaacagaggtttctcataattatctccatgcgaaaaccgggcgaatttacccggttaagtaaaatccgaactattaaaatttcatgctgacatcaagccagaaagtacggccactggcgtaggtcgccacaccggtgttcgttgtatcaacagcggttttgctatccagtacattgagaatatcggcactgatcgtcaggttttgttgttgcagaaattgtggcgtccaggacaagcgggtgtcccaggtcaggctgctatccagtttttcgtcaacatactgcttgtaatcactatattcgctgatgtattgcgcatttgtcttaccaaggataatgcgagctttacgcgcttcttgccaggccagcgtattcgcccacactaacccgctcggttgatgcgtgaaatccatgtttaaggagatctttaatgggttattaaaatctgccactggaacgctatcgtaagagaccagattaccgttataaaccacctggttatcaccggtattgctctcctcataaccattgtttaagctcaagttgcccttgctcttgatatagctaaagacaatttgtgggttaatatctacctggcggatatgcaggggttcggccagttcaaaactgaggctgaagctatgcgttttggttttgccatcgttgttatattcagtaatggtggttttagtcgcgctgtcggtacgactgcttttgctgatttgatcatgcgcttcacggtaaacatagtttgcacgcgcaataacgttcttaccgattttctgctgcaatcccattgccagttcatcgttataaggcgttttcaaatcctgataacgcgtcagagttttattaccacttacgctttccgtccagctattgcggatatcacgtaatcccatatcaagaatattcccgccatagtaacggttataacctgctgtaatcatactggtttgattagcaaaaatatcccattccgtcataaagcgcggggagatattgtggttactcagatagttgtcatagtcataccgcacgccgggcattaaactcacattacgccagctaatgcgatccgccatatacagcgtgtagttgtcaattcccaggcggcctttacctttatggtaaatggtatggttagttttctttccggcagcattaatcacataggattcagactggttatggcgttcagtccacgcatcggaatagatgtattccgcgccgaagtagggttgatggctaacattacccacggcgaatttttgccagtccaggcgtgttttgaaggtgtaattatctacagcctgggaaatgtgtcctaatccgccacgggtgcaacgccctgtaatatcaccatatgtacaactaagttcggtgtaccagatgtcatgatcgtgacgggtataatcactaatatgatcccaaccaacggtggtacgcagtttggcccatgcgagctgcgtatccatatcccatgccagaccataggatttattacccatttcgcgatcagactgcgggaaggtgctggtattataatcacggctggagccggtatattttaaggttaaatcgtgggtaaagcggtcgctggcaaaccaggtaaatttgcttaatgcagtatcgataacgtttttatactgtgcccgaccggcgacaatgccgtcattgctaacataatccgcgcgggtgatatcagactggcggcggcttaaaccggcggtaacgccgaagttatcagcgagttcctgattaaagctcaaggtataaaagttctttttaaaatctggggagtaataagtacttccactagagccttgattaaatgcgctcttgttattctcatcgatatggcttgttaaccagtcgctacgcgtagtgcgataacccaatttcaccttgctatcatcagcgttgaagcgtttgatctttgcatcaattaccccgccattgaagcgaccaaattcaaccggcacaaaactgtcataaagcgtcacattgtccagtaagctgacatcaagataatacccctgactcatcccgctaatattggttgcactactggcatcggactcattcgctgggttcaggttattagttgcactaataccgtcaatcaaataggcattctggtaggggctcgcaccgtgaatagagattttctcagggcgaatatctccctggttcaagctggtactttgcgtactatccatgcgtaccgcagggttggttctcagcagatcgctgatattgccattcccggtcggtaaacgctcgatgctttcactggtgtaatgcgtgttgccgtttacgggtacagggacaggagcatagaccgtcatctcttcaaaaaaatgcatgtacatgtttttgtcatcgacggcctgcgccacatcagcgccacataaaatgacgccaggaataagaactcgcttcatttatttatatctccgtacagcagggcttttattgtttttataaaaccgcgctaatgtcacaaatatcatcggccaggttccagacaccgggttgatgtgtaaccataatgacgccgcttgtgggtagtttttcacgcactaaacgcagtaagcggatagcctcttgttcctcaagatgagaggtagtttcgtcaagaaatatccatttcggacgtcgtaaaattaatcgtgccagggcgatacgttgtttttcgccgctggaaagaatatctccccagcgatcgtggtcatgaatacgcgcagccaatttcccaagaccaacctgatgcagtacttcgctcaagcttttatcgtctacgggcaggggaagtgctttacaaataatctctttcagtaagccggttttgattaacggtgtttgactcacataccaactgtcagcaggagaagaaatatcacctttaaaccacggccagcagtgggataatgttttaagcagtgtggtttttcccgcgccagagtagcctttcagtaatagccatttgcctgggctaacatgaaagttcaggttctctaatatgatcttattatcaggcgtacgaatactcgcatcagccacttgtaccgcatgttggcaatttttaggcttattcgtagggcgctgttcagtgagttgatggaactcatacaagcgatcgataaccgcagccagttcagcaagttcgtcatatttataaataaaccagcttaaattgttgcttaccagcataaatgcctggcggcttttcatcagtccgcccagattgatctgcccgctaataaactgcggcaataacagaaagtagggaagaacgctaaggctgcggctataaatattctgccagtaatcaagccaccgctgacgattcattaaacgatgccagttctctttaatggtatgaaaattgtcgctcaactcctggcgttgtagagactcagcattgcttagcgcaatcagttctgcctgcttattatgctgcacaagatttgttcgaaatgtcgcttcgctacgttgtttttccacattaagcggacgaatacgtttacccaccttatgggtaaataaagttccaccgatcacaatgagcacgacggtatagaccatatacccctggatattccattctgttccaccaacagtgaaactgagcgtacccgcgctttcccaaagaataacggtaaaggtgatcagcatgctaagactctggatgaagccaaaactaagactgagcgttttgctgatcagtaagagaatgtcttcagcgatacgttggtcagggttatctgtatttttatgctcgccgtagatctgcgtgaagtagtagtttttatctgcaaaccaccgattaaggtagtaatctgttaaccattcgcgccagcgaatagtcagtagtttaattaaccatgttttgtttacggatattaatacaaagatccccagcagggcagggaaccaaaggacaagctgccaaagcttatcggtttctttctggcttagcgcattgaaaaaatcattattccagtcgtttaaccagacctgaattttaaccacgccaaggatcatggcgaggataataatgattaacaacacactagttttattattcttacgcagccaaaagggcttcaacagacagagatactttgctatcaacatacgaagcgtaatgggaatggttatcattagcgaaaattgattgtgccatccaatgattatctatggcaatgatttactgatgaaatttatttaagtatcatttaacaatatgaaatataaaggaatatttcattttcagtggttatggttatgctattgataatcaaggatattgctaatgccctgatgcataccacgtaagccaggattttcgcaagggaagatgatgatgacgaaacacccgacaggaatttatgtcgggtgccttgttaaggtcataagaaggaggctaagaatggagttaaaagagagcgttattaattattctccatttgttttgcaacatccataatgtggtaaagcggtactctgttcttagctaactctaccatggcgttcatataaggtaccatggtactaaaaaggattttataaccttcgcaaaaataagaaacagtctcattgtttactttagtaatacgatgcttaggacaaccgccattgcagataggtttatatgcacattgctgacatttcgctggaatccgttttttttgcgctgtcagttgtacactgttcatcgttttgagttcagatttattaatgtttccaattttgtactgtggatagacaaaatggtcgcattcgtaaatgtctccattactttcaacaaccagattatccttgcaggactcctggaaaatacaactggtatgcccattccccaaaaaacggctgacaaagctttcaaactgacggatgaaaatttcacccacatcgtttttaacccattgcataaaaatggtactcataaacttgccataagccgtgggaggcacagaaaaatcaatgatacggaatgtgttctcactatgaccactgaaatcaatattcggcgtcccggtttctagcaattcgataaattgcatatgtttactgccgatagattttaaaaaatgataaacctcaagagggtaatggacattaacgttattaatgacggttaacgtattaaactctacttgataacttttcagacgctcgatggctgctatcacttttgcaaaagtaccgttaccactattactgcgtctgtaacggtcatgtaactcctgggggccatcgatgctgataccaaccagaaattcatgttctttgagaaaggcacaccattcattattcaataaaatgccattcgtttgtaatgcattaaaaatacgtttttggcctgcatagcgttgttgatagtgaataactttacggaaaaaatccaggccagccagagtgggttcaccgccttgccaggtaaaatagacctgattgccagacgctgcgatatattgtttgatgaactctttcagagtgctgtcatccatccatttttcatgagtaaactggctctctttttcaaggtaaaaacagtaatcacatttgagattacattgaaaactggagggcttggctgtaacgtgcatcgctatctcgctcaataaggcggcggaaaaatccgccgcatgaaggtttagttatttcgcttcgcttagtgctttcttgatattgttaaacttctcctgatttacctcgctaagcggtggctggctgctgtcgataaactctcttaccacgccttgcatctctttaacgacctgcggattggcggcggcaaggttatctttttgctgtagatccgtcagtttgtagagacctaactgattgttttctactgtatagacaaggctataatcgttatttctcaccgtataagagaattggcttaagtcctcagtgttggggttatgcgggtaatcgtcactctgatggcgaacaaatttgtggtaattatcccagaatggaatattttcctcgtcaaaccagtgagaataagaggttatccaggtcagatttttatgtggctcgccttgtttcttatcttgcaaccagggcagcaaggaaacgccatccagcttaaggtcttttggaatgctgatatcggctgcatcaagagctgtcgggtagaaatccattgcggaaatcagcttgtcataattaccgggttgaagttttcctttccaccacataaacattggggtgtgagtaccgccaggataggtctgactcttatagcctttttgcgccccgttcagcggcagaggaccatcgataaccgcaccattatcggaggtaaagagaataattgtattgtcatactgtccgtttttcttcagttgttcgagaatgcgttttacaccctgatcaacagaataaacggaagcgtagtagttatctgctgtttgactaccggtattaaattgcttctgatattgatccggtgcaggattatcatttggcaggtgcggagcattataagccaggtaaagcataaaaggctggtcaagtgttttggcacgatcaacaacgccaattgcctcatcggttaactgatcgctgatataaccttttgcggggacacgttcacgatttttgaacagactaggggagttgtaatatgccgttcctgcagcgtggaatcccataaagtaatcaaagccacggttttgaggttgccattcttccgcagaaaatgtggtgaagttgtcatgatagtcacgcgtttgtttatcttccggtaccggcacattactgattttactcaagtgccatttacctactgctgcagtgtaataaccatgattctggaataattcaggcaagaaagtttctgttagcggaataccatcctgagcatcggtattggaatagacaccaaagcgggcgggagctcgaccggtcattattgcggcgcgggaggggccggaaacaccgtgtgccacatagccgttagtaaaacgtacgccttcatccattaaactaaggagcgtcggcgtacttttttgtgcagcttcaatggctttatctatccctattttgtaggtatcgacaacttcacgattttccattgtttttgggtcaaaagatcccttatcaaaaggaagttgtccataaccaagatcatccatggtcagtacgataatatttggctttcctttggtactgtattctgtcggcgtaaagtcactgaaagcaacgtttgttttggttgctttcagctttacatcatctgccgcatgagcagcaaatgcagccataccagatgccagtatcaaagatatgctggtacttacgacacttttctttaatgcagacttcataaatgttcctcttcttattgtacttaattccaaagtaattttacgaagagaaataagtggatgtaagtgaagttagtcacataaagagatagcagatttagctaaaaaaagggaaaaaacagtccataaagcgttgacattactttctgttctattaagtaatttctcgccgataaacaactaatttattgatatttaataaattattgcattttactgacaaaatgcagaattgagatcataaataatcatgcaacaggttatgcaagtgcataaatatgtgatggatgtcacttatttatttcaataaatatatcgcctaaaaacaacgcggggcagggaatggctgccccatttaattcttacgcagcgtgtgtggttgactactcgttagcaaataatcaaatagctaaagcattcatcgtgttgcccgtattcatacccgtgtgactttgacaacggtactccttagaaactctcttcggactgttgccgaaatgtttgcggaacgcataaataaaataagatgtactggcataaccacattgttcggcaattttattgacactaccttctacgcgtatcaaattttttgcgtgctgcattcttgcatctaaaagaatctgactgaatgtcgtttgctcttgcttaagttttttcttcaacaggctttcactgatgtacaggcagtcacaaatatctttcagcttccatgggtgcgccggcttcatgttgacaatatttctcactttcccagaaacggatagcacaccgttagttaatagtgtaatgaaacctttgcatgcggcaaaaatagacaggcaagaaaaaagcaaaagttcactaaaattatgatgattgcgttcttcgctgttgagataagcaatcatttcattaagcaatccagtcggtacattactagcacgtaaaaacttcgcaggaacaggcaccgtcactgtctggatgttagtgcattgtagatattttttaatggtattttcagtaaatccgatctctttaaaatgccgctcataaggttcaaaatgcgtacgaacagcgttatctaccatcaggatctcgccgtcagagaaggcgtaatctttatctaaaatgttagcgttgaaggcatgatgaataaatataacagaacaaacgaggctcattttatctccttaaaacaataaagtttttatcgatacttttttaacatttcatatttataatttgctgtttgttttcagccttgcaaactattgataatgaaatgtgtaagatctcttgcaatgcgacccatttctgaaatactcagctgatcaattgccgaaaaaatggctatcaacgtaagtgtcagtaataagacaaccacaattgcagacatgatttctttatagttgtctctttgcgtgattttgtttttcactgtggtcgcatgcatttcaaatatgtttatttagcggataacgttaaaaatcgttaatcagtatgcttaatataacaggctggagaaaagaggaaataggactggtgcttcagtactgagcggagtttcttacagctgtaggcagaagtttatatcttatagtatgtagtttaatttaatccatgtgagcaaattgcgaaataatagtcaatgaggaattcttctgctgtgcggatgacagcagaagaaatgagaagaggcattaattacttggttctaattcaaccggaatacttttatagccaggaatgccacttaatggatcgtggttatcaagtgttagcatgtgattgctttctggaaaataggtcaccagactgcggtcagccatagggtaaatgaccacttttaatctatccatgcggcgactgctgcgcttaccgtctggcgtaagcgcaataagattaactctttcgccgttttttacacggcaaattttagcttgtttagcactcataaagaccacatctcgttgaccgaatacccctcgatagcgatcatccataccataaatcgtcgtgttgtactgatcgtggctgcgtactgtcgccatgaccagcttactgttaaacgcactagagggatcttctaacagccctttgctggtaatgaaattagccttaccactcggcgtcatccagcgcctttcagcagctgcatttatcaggtgaaaaccaccgggatgacggatgcgctggttatagtcggcgaactctggcagcacagcttcaatgtcattgcgaatgcgatcataatcttccaccagatactcccaggctaccacgctctggggtagtgctgcctgcgcgattcccgcgaccactgcacactcacttttcagcattacaccggcgggttttaacacgccacggctggcatgaatcatgctcatactatcctcaacggttaccgcctgcgcaccgtttttttgcatgtcaatctcgctacgtcccaggaccggcagaatatagctatgccgtgcggtcaacagatgagagcggttaagcttagtggctacgtgtaccgccaaatctaattgcgttaacggtacagcgctcgcttcccgatctggcattgccagcgcaaaattgccccccatgcagatcaatgctcgagcctgccccgtacatattgcttgcatgctggcaattgcagcatgtccaggtgcatgaggtggggtgaagccatagcgctcacccagacgagccagaaactctgcagacggtttctcggtgataccgacggttcggtcgccctgtacattagagtgtccacgtagtgggcagatacccgcaccaggcttgccaatgttacctttcatcaacagcagattgaccagttgctgtacgttctgggtaccatgttcgtgctgagtgatccccattccgtaacagataatggtgcgttcggcagcggcatatgcgtcagccagttcggcgatttgtgtctgacttagtccagaaatacgttcgatatctttccactcggaattgagaacgtcacggcgtagctcgtcaaagccgacggtatgcgtttgaataaactcgtcatcaagcaaactaggccgacctgcggcgcttgcagcatcatcgcgctcaattaacaggcgcatcatccccttgagcaacgccatatcgccaccaatgcgcacgttatagtaggcactggccaactgagtctcagagttcgtcagcatttcaaacgggttttgcggtgcggtaaatcgctccaggccacgttcctgtagaggattgatggcgatcattttcgctccccgtttcactaaagcgcgcaagctagtcagcatgcgagggtggtttgtaccagggttatgcccaatgcaaatgactaaatcgcacttctcaaagtcttccagcaacacggtccctttacctacaccgatactcgctgccaaacccacgcttgtcggttcatggcacatgttggagcagtcgggaaagttattgctcccgtattcacgggcaaaaagctgataaagaaaggcagcttcattggaagtgcggccgctagtatagaattcaacctgattgggatcactatagctttgaaggcgtgcgccaatttcgtcgaaagcttgttgccagcttaatggcttgtaacagtcgctgacggcatcatatttcaaaggctgagtgagtcgccccgcagcctcaagctcgtggtctccccaggtaagtaaactttgaaccgtattctcagcaaagaaagaggcgtttacctgcttatccgtgacttcccaggcgattgcttttgcgccgttttcacaaatgtcgaaactcgcactgtgcttaggatctggccatgcacaacccggacagtcaaagccctctggcttattcatgtcaaacatggcaataacatcctggcgtatatccatctgcttacgtactgcattcgctacggatttaacagcaccccaaccacctgcagcaccctggtaggattcaatttttttcttcatctacttatcctgtgtggaaatgaattattaggatttgtaatagcgatgatgcacagtacatacaaagggattatcgccaacatggatatataagagtaggggactactctctttctatttttaatctattatcgttaaacaatagattaaatacgataagttaagcatcatctctcatagtgtttaaattaacatatttttcaatataaaaaataagactctggcttcaattgtgcgcggattttcttacaggtgtaggctaatagccttcacaaaataattatccgcgcaattttcgtgaatggagcgcatagactaaggtcaaaatcacaattattcatagataaaagtgacaccaatgacactctggacggttccggcactaaccttgtttcctgtttgtccataggttgcgcttaaacccagaggtactttgcttttatttactgtccccagggagacattttctcccgtagccagtatttttccattacgcattagagtgacacccactccgcttgcttttgttgcatcaggtgctgtgttagcaaacacttgtcggctactgtcagtggtggcaccgctaagataaaaactgagcttttgttcgctactgcaatatacgccaaggggtatttctgcgcttccaggaaagtccgggagatccacggtgacatttcgactatcaacggtgcagccgcctgttggcataacaacattgttattactaataatattccacgtaaaattacgcggatttccgcttcctaatgttgcaattttatacatatgaatacgggcaatgacttcccccgcttttatgacaactccaccggccgccccaactggggtaatatagagttttaacggtaatggcatcggtgtcttatcaccaatatccaatacgttggtatttgtcgtcaacgggaaggggtaggtcacattattccagtacaggcttcctttataactctgtagggagcctgcgaaagcactgccttgtaccaggtttatatgatcagtgtcgtaccagccgccgtaatcattccagcaacttatatgctgagacaagtctacaaccagattctggcccggctgtattacagggtcgagattaacataaacagaggttgtacctgctccaatactactcccgccatcgacattacaactgaaggcaaaaactttgcctgccattaatagaagataaataccgaacaggacctttatactgattgttttacccatgatatatcctaaggttaaaaattgatttaaaaagaaggctaagaaaatcgaatcgacgttattgccaggtgtagatcacattgattagcgcctcgatcgttccctggcttgcgtttccattcaccgtgatagctcttgccttaagtggaaactgtgcattacgagtgatctcatcaacaataaccgttttgctatcgccattttttaacgcagcatcctggtcatccctcagctctatctgaatattttcggcagtaccttcatttttgtaataacccgtattgtcagtactacctgtcacgattgccgtcactgcacttgtttcaaccggacaatcggttaaactcaaagtaatattgtgccagccagatgcagaaccaggttgttgcagattgcgcgtataaagatccccgagattaacgttagcttctttggtttgaatagtgcagggtttagcgactacccgaccattaacagtgatagtgacatcggcggcctggagagttgctgtgaataacgcgcaaaacgtagctaacaggaacctcttgtgaagtcttttcatatctgactctgattattgaaattcaagggtaaaggttgcgctagccctcaccagtcccggattgacggacttctgagtactcttcagacgagcggagtaaggcaaaatattgttctgttctggtaccagtgggatccactgcatcccggcatgaagatcattcagtttcaccggacgcatatttgcgtccaatatttctatacccaaaccggaggccgtattgcttccttcatccagtttcaacaaagtattattttctgcatcctcaataccgttaaatgcaacccgaacccccgttgtccctttgctgcattcacttaacgtaatctgaaaagggacggctggacttgtgctaccggtcgttggaaattgtctggcactgtttttttggagatctacggtaaaattaaggctatcgctactgactgtgcagccataatcgaggacgcgcccgctaattttaataacgctatctgcggataaagcagaataggtggttaaccccagacataaaccgaggaaaataatgttattgtatttcataatctattgttccttagcgacagattgctgtctgctggttcagtaaggtaccaggagaaacttcaggaagcttgtactcgacaatacagttactgtttttatctttgccccaactaacctgtaattgcccactctgtggaagtccagtcagataaacctgaccattttccgcgacaatgctgccatttttattctctccgtgtgtgacaattgcaccgaatggaacgctcttattaccgtacttcaacgtcattaatactttcccgccgatttgtgcattaaatgttgctctggcaatagcaccgtgagttgggatgacagtgaccacggtttcatccagttcaacattatctgcaagggaattcgcgttaagagcaacacggttttctctatattctgtcgcaaatggtaatatggcatagccacgccagtcggtatgaattccggtctggttctctattttgacattatcagcaccaggagccttaaccagaaccattgtgtcgcccagcggctgtccaaaggtgatgccatcagcatgagcaataatcccaccactcattccgtaataaatctggctgctgtcaccactccgactgtaaccgacattagtattaccataagctccacgataattaagagaactgtaaccactggtgccagagcttgtattacctccgtgggtgttaccgacctgaacgctataattcaggttattatccggcagcagagtgccataaaccccgcttagattggtcatgccgcctttcaaatcgttactcatactgtaactggcgttactattacgaaatgcgctctgactgtctgtacgcatccaatgactgaagggaacattaagcgtaaaagcgagtaaatgatcccgatcgttttgccatatattattggaatagctgtaattcaggctagtcgtaatatcaccaaacggcacatttaatccaaaacttatttgctggtcgctgcgactcgtgttccagtaactttggcgactggcactgaaaaatgtcgtaccgtaatttccaagctgctgagagatgcttatttgttcctgaccacgcttactgtagaacagattaaaataatcaataaattgtgtctgctcattggtgtctccggtaggaggcttgacggtgtaaccactcattcgactgtaggcactgtcggataagttataaaaaccttgcgtagaatagcgatatcctgcgacctggatattggttccacaacaagtttattgctgcacttgttgaagagagtatttgcaaaaacattttatgtcgctaaataacatgacgatttcattatgcatgttatttataaaccgtgactaaacagaatattattgcgaacaagggaagtgtcaggaaaggtcaagagctaccaatggttaatatggctataaatcattagctatggttaatgtttgcttgctgaaactaacaccgaattgctctaaacagataagtgcagggtttattaaagctgtccgacagactttcttaacctggtaatatctctcttgggtgactctccaaacatccgcgaatattcccgacactaatgggatagctttcgtaaccgacagcataggctgctgtggtgacatcgtaatgttcattcagcatctgtcgcctgacttcattgagacgtagccatttctgataccggagtggactcattcccgcttgatccgtccttaaataagtaacagcaccctctggtgttttcgtatgcagtgtctatgcgacagacactgcgctcttagcatggggcagggaataaccaggctatttctccatgcacaggccaattatgaaagaggagaggcttaagttcttgaaccctgaacgaataacgactaccagaaaagcacttcgcatcactcagacatgatttaacataatatacattatgcgcaccaatataaaccaaggaagaatccagtcgttggcggtcatgattgtcatgctcattaacaatgaccaaaccccatatctcacttactaccgtattctcggcttaaccgtccatgcaacctcaacacattgctttcaactgccgtcaccacgttctccggaaaatctgtcggtaaactagtcttcacgttatccagtgctgctggaatcattctggcaaagtcactcaggatttcatgcatctgcacttccgggaatctcagcacctttgctgtcgccaaaaaatgtcgcggataaattttatcgattgccgtttttttgcctttggatgcgttaagccccattgccagtttgagatcgctgatgtgtattcccgtaccgccaaggaccggaaatgcactaatgatgtcgtaaaatggcgtgagtcgataactgccgccagcctgaataaatacggagaagttttttgcatgaccgtccgttgcgccaatcaaccactggaagacctggaatttcataaaatcatagcgatctttcagcgcctcgctggaccccatcaaaaaagccatgatccgcgcgatgcctgggcctccatcactttcatatttcacgctactaggtaaaccgaatgtctgacacatatcctcctgtggcaagcgaagtaaaaccgttcgctcagcattccaacgcctgtcaaaacgttcgaccgctaacgcgcgcacatttcccgctttaatgatttctgcgtccggaacattcaacccaagttctttcgccagcagcagacagtaatactcattatcaacgctttggctgagatcgagcgtcgcattgggctgcctgatttcgccaatcggtaatttaatgatgtgcgtcgtcggcgttattcctttcggaatgcaccagtcattgcctattctgagcagtgctgtcttctcctgtgcgccagcaacgctgatgcgaaagtcattttcttctctaatcatgcctagcgggatatctgctttataagccgttaatacttcttcaagtctggcttcagtaagcttttcccatgccattatcggatgcgttacggtttcgtcttcgggtattaacgtcacggcaccaacgctgtctcgccctatttcactcaataaatcaaacggttgtctggatttggcatgataacgtttaacgatccggtcacgtacaatcgggctatcgggtaacaggttatcgaagaagttaaatacggcatcagaggtgatattccccctctgcaatggcaggctaagactcaacggtctggcataacggcttgctaaccactccggtgcatacttaaaggtgtgcgcgccgttggctaacttcgttaactcgcctacccgctggttgttcatccaagtgacaagtttaggcattaccactccagattttgctgttctgtactttctgggctggcatttttcgcgtcgcatagcgtcatactgagttcaaggctctgtaaaatcttaaaaaatgtcgtgagcgtggtattgtcagggttgttttcgaaattggaaatcgtcgcctgcttaataccaatttttttcgccagctcgctctgcgtccagccattttgctggcgaaccagtttcattgcattcgccaattgcgttgggctatagatcttctgaaagctcatcatgtcatacgtccacagcaagtttatccgcttaaggggatattataagttttatcctttagtgaggataagtcaatctggaaacacatcttatccgctctacgggataaacgctgcgatatccgcgatcgcggataaaaaggaggatttaaataaggcgttgatgcgccgtttgaagtcggcaatattaagccgcatgccatctcgacatgcggcttatacggtttaccagctatatttcactcccagcatgccctgagtatcgctatagcctttatcacctagttgcacaccgacattcccccacaggctaaggttgttatttactttcgcctcaaccccggtacgtacttcaccgagattacgcgcaccttcacggcctacggtttgaccattcatcttcacggcgtagactttgctattgttgatccagttcgcttcaatgtaaggctggaactcacgctgtttaccatcgtcacgctggtgatggctgttcaggtaggttttcaccccaagtcgcgtttgcacatttccgtcgccttccgtttcaatgcgcgttccgtctttccgggtatggtcggaatctttcacacccatccaggtgatttgcgcctgtggctggacgtaccaggtattcagcgtcccttcgctgccgctaaatgttcccgcttcaaaggtatacccaccctcaacagaggccgtcacaccgcgagaatcatagtcgtcagcagaacggttatcggaactgacgctgttatcaaaccagttatacagcgcccagctgtcaacataagcgccggtcttattcgcatcgttctgataccaggtcgcgtacagcccagcgctgtaaccgctgatgcgcccatcgcttttataacccacacgattactctgagtattactgtgctgattggcgtagcctgccatcacgccaagatgccagcgatcctgcgcgttgctactccactgcgccaaatcgccgcctagctgcaatacatagcggttagcctgagtatttagctgaccgtcaccggccctactacgttcgtgccctccgacatgacgcatccacatactgcttgcgctcccctgagaatgcagactatctgtatactgcggctcacccagacggtcgtgtaaacgatggctaaacaggctgttggctgcggcaatgttgctgatatagcttccggcctccgggcgataaacacttgggccttccggatccacaacagggggattattgatgggatcgggtgtatccgctggcgttacgccgtcccatttactggtcagataccagtttttctcgtcattccccttccctttagccagcgtgtagacgtaagccccagcttcgacagttccggtggtcagcgcgaagttacctgcagaattaccgccaacctcaatgagttcaataccgttgaccgtttgtgcaccgacgccgccaatgttatcaacccgaacgcgagtgttcccttgggtatcgcctttcacgttcatcttatcggtggggctattatcgccgcccagcgtcgcgttgaacgtcatcaggccattgtttccggtatagttgccgttaacggtcagtacattccccggtttccccccttcgctattcatttgaaccgtgccgccattctccaggttgccgccgatagtggttttagcgacacgcagtgccccccccaggcataacgttcatatcacctgcagtggtgacatttccgctcatcacaccgctgttatggatattaatgtgttgacttgccatattaatggcagagtcggaaccgaaagcaatttccccccccacgatatccgtcgtaccctgatacgccgcggaatcgttgttaagagtcaggatcccggtacccagttttgtcacatcaccgctaccgctgatactgtgcgtcatcgcccagctacgctcagtggagatggtgagcaggccattattgataacggaagcatcacccaggtttttctgctcgttgacgctgagcgcgctgcctgtatcaatgttgaattgccccacaaagcggctattatcgccatccaactctacatctgtcctggcggttgcgctcacgatacccttcccgcttatgctattacgcagttcgccagtcacgttttttagcgttaacagaccgtcattggcaatatttcctctgcctaacccctgagtattatcgaggctgacttccgcatttgggctaatgctggttaacgcattgtagcgtgcattaagcccctcgatagccagcgttccccctgtaacattcaggtttccgccacctgtcagttcaccctgactgatcccacctttatttaccgtcagcgccccctctttgaacaaaacagtgctacccatctgcccggtgaatgtctctaccgtctgcgtgcttccattaagatcgacgatggccgcgttgctgatgttcagttcccgggtgttgccaagtgcaccatccgcatcggtacgtaatgtccccatctgaacgtaggttgccccctgatagtcgttctgaccgttggaaaggctaacctgtcgcaccgtattgattgccagatccccttcaccaccgatttttgcgctcatatcggccgttgcgccataggctccgccatgttcggctaacgtcagcttttgcccaccatggatgttcagcgctttcagcccatagttaacgtacaaaccattacctggtgcggtcgtgaggcggaatccataatcaccctcggcgaccaccgttccgttttgcgcaatgtgtaacgttttgtccgcttccacctcgtcgccctgtaaatcacgtaacgttaaactgccaccgctcccaataaccgtttgcgccttcaccagttgaacgccgacatggctatcgtcgtgttccagcaaattgagcgtcgtcagagggttattcgccatgggatcattccacggtttaggcacgtcgataagcacgtcgcccgtcccgtttacctgatagttacggcctttccaggtgtagtcacccgcgccgacaaccagcgtatcgacgctgatatatccctccgcgagcgtcgcagcaggaatatccgtatcgaaaatgatggtacctccattcatggccagtccaccaatggattgctctccaacttttacgcttgtggtattttcactgtcagactgcaacatcgcgtgagtaagcgcagcggtgttgtcgcgttccagagtgaaggtactgtctttcagttgggcaacaccggcgaattcagtccctgttgcatgggtaaagccaaacatcttgtcggaggaactcagctgcactcgcatcaagccatcgcctttgagcgcattggtcagcgtgtaatctcctgcactgttcgtacttgcgagaatgtcgagcgtaccggggtttgcaatggttacttcactgctccccatgcccgttaccccatctgccgtatgagacgcaatggtcaggaggccgtcattgaccagcgttttaccgctataagtattccctgcattgaacaccgtatggcctgcatcatggatcacttttccgtctttatcgtcacctgtaatcagcatatcgacctggtagccggcatcactgttattggtatgattaaagacaaaaacgccttcgccaagaccaaactccactttcgtcgcattggtgataaatccggcatctgccgccgcctcaccgtgagcagcaccaatgtttagcgttcctacagcaggctcaaaaacacctaagtaaacttctccaccttcgacattcagcgtaccgttattcgtcagggttaacgtacccgtaccagatgtccctacgtacatattgaatgtttcaagaagagagttctgcccatccaccctcacgtcgcccttacttttgtcattgagagctatctgtgtatcacgcgctttaactatacctccggtggtaatattcagttcacccgtgcctaatacaccgacctgtagcaattgtgcgttagtagaacttgtctttaaattccagagactgtccgtactaatattaactatccccttaccggaggcatttcctccgataaatccatagcccgtactattaagggtggcaccattactgacatttacgataccgctaccaaaattaccgacattgatacccacagtatcgaagctacttgtcgcatccatcaggttcagtgtgccgataccgcttgctttatcgcccaaaaaagtaatattttggcttacgaacttaccgccatcgctaatattgaggtttccgacgcccgcaacaccaatggtggtatagacattcttattgacctcccacattccccccgtggtgatgctgacattcccgacgccggtttctccataaccgagactacttcctccgttgctgacaacaagcccctgattactgatattcatttcgccgtggccgtcataaccaagattagttccgagattagtgataacggagttcttatccttaacagtaatgttgcctgtgcctgtttctttcatccccgcagtgataattccgctatctactttgccttcactgctgacattaagttcaccgtcgccagcatcaccgatatagatatagcggaaagcttcgcccgttccgaggaaattccaatgccctttatcggtcacgttgacgacaccgtgggaaccgtcctgaacgcccaccaaactatattctttgttattaatcagtccattattggaaatattgactgtgccattaccgaaatatccattatagagtctgcgtaccgtgatgacagagtcttgatcctgcacattcagggttccgataccggtggcattgccaccgataatcgtattttcagccgtaaccaaccccccctcgcgaatagtcgcctccccagttccttgattaccaatttgaaattcaatactggaatcattattttttattagccactcgccacccttttcaacgacaacctggccattactgcccgcctgatagcctaaaatggcgacgatactactcgtgacgtaacccttatccgtaatatttaaactacctgtgccatagctacctatttcgaataattcggtcgtcagaacagagtcctctccctcaacattgaccgtcccgacgcctcctgtgctagaacctaatcttaaatagcctccatcgacgtgacccttctgtttaatattcagcgtccccgttccggattgacccacatttaaaggccttgcattatttccgctatcatacaatcgccaggtgccacccaaaacattaacggtgccctcactgtcctcattagcgccaatgacgctggtagtaatagtggttaaggaggcattaccgccagccaaaatattaagcactccagtgccataccagccaaccaggtaggcatcataagcaacatcagtatcaatattggtaatctgatcattatcaacttccagacttgcaccagacgcactaccgcttagtgccagcaaaacacccagcgtcaatctactgaatttcgttgtcagtccagaggatttacgcaaattaaccgtgcttgttttacctgccctgcgagttaattcgctgcaggcctgaaatacctgtagagtgcaattccatatcacgcgatagattctattcatataaacgctccatatacaaacaatacagccacgaaagagatgagtcgtcagacattaaaaatgaaacttattaaattgtcagaggtctgtattgagtgttagttggaggtgggaaggtgtcaatttggctaatttgctaatgctttcgaattgatagattaaaaattgcatagttcttattttatttaaatatgaactatgagttattgttgcttaataagaaaactgtttctttcaataggaaaattatcatcatcatatttaacaaagaatagcactaattgctaaaaatcgaagtttattaaaccccttttgcatccattagtgtctttaggaatattcgctataaaataagggttgtgcttaatgctttaagaaaaatagcaattttcccttgaatatcgtactggtgatggaacgatgaatctgcaagctggcttttaacaagccagctctaaaagaagggaaataagaataactatactcaaaaactaacagccacggtcatcatgatgtggctgtcaatgaaattataacccaggcgctttccataagctcgtcgtcagtccatgatcaaccagccccagctgatcctgataaactgcctgccacttatcgcgactatcctgataaagttcatgcttttccgggtctggtgtgtgcgtccgttcccagcgaaccaggcgttctccggtttctgccatactactaaaaattccggcaccgacgccagctgcaatggcacatcctaatgcagtggcttctttgaccaccggaatattgacgggtaatccgctgacatcagcgagaatttgactccataatttccctttactacctccgcctgcaaagactaagctactaggatgaatattgctgaaatcagcaatttgctgcaagttacacgcacttacaatcgccgcattttcttccagcgcacggaacaatgtcgctttgttacatttatccgggtcaatggacaagttaataaaggaaggcgcagcgtgataccaggttttaaagcgcattctgtcggagaagatcggcattacgccccagctcccaggcggcacccgactggccatctcttccagcagcgtataggtgtcgatgcctaaacgttcggcaatcagtttttcttcggcacagaaagcatcgcggaaccagcgcatggtgagtccggtaaaaaagcttatagattcagcttgtaccatgccaggaataacatgaggattaacgcgcacgttcatttctgggtctgtcaccggcgcggctaaatttacaacttgctgccagaatgtgccgccaagaaccgcggtttgtgccggacgcacaacgcctaacccaaggcaaccaagctgcacgtcgcctcctccaacgaccaccggagtgcccgccttcagaccgcagagttccgccgcttgactacttaccacgcccagcaatgtgccggtttctttgacaggagaaagaatatcggcacgtaggccagccatatccagcaatgcaggtttccagtcacgggtggttagatcaagaagtcccgtggtgccagcgttagagggatccaccgccagttcgccgctgagcatataggccagccagtcgctgatcatggtgatggtacttgcctgacggtaaatatcggaacgatggtgcgccagccaaagtaatctggggatggcacttaaagccagtgtttgtccggtcgcgcgataaacttcgttttcaaaggtattgttgtgcagttctttaagttcgctaacttcgcgtgccgctctggcatccacattggcgcaggcccagatcggggctccttcattattatataaaacaatgccttcacgcatgctacatgcgctaacggcagcgatatactccggggctatgccggcgttgtgcagcgcctggcgcatacactcacacgccagttgccagtttttgttgagatcaaattccatagaaccaggaacgtccggtactgccagatgccgccactccgcctgtcccactgctatttgattgccttccaggtcgaatatcacagcccgaatacttccggtgcctgcatccagcgccatcaggtagtacttactttcactaagggtaaagagtcgagccattagattatcctcggcttatgcgttctgtctgttcctctatacgttctccatcattcccggtaataaggtcatgcaaatttaactacgtaaaatcgccgctgctgtgtcctgatcggtaaccagtgcgttgatataaccgcctttcattgcagcggcaattgcttcggctttattttctccccctgccacgccaacccggacgggtatggtcttcagcgcgcttaaaggtaagccaatcagttcgttatgtattttgatattcgtgacaacgtcaccttttgcatcaaaaaagtagcctaaaatgtcgccaaccgccccttttcggccaatcattaactgttcgccctggctgatataaccggagcgaatgattgtcgcatcgtcctgttgactcacagcaccaatgccgacaatcgccacatccgctgcttgcgcggctaacagaacatctttgacgcaattttcattttttagcgtacgggcaatgtcagcggaggatgcccgcaacggagccggaataatattcacactgcacgccgcgttaagctgcccgattcccgtcatataagaaccgacgccaccggagagcgtgaccaggcgaatttgctgactgctaataaaaccacttaagcgttgcagcgtattcatggttgcctcgccaaaaccaatcgccagcatctgttgtggttgaagtaaactcatcaacatatgcgccgcgcctatccccagtcgcccaccgacatcagcatccgcaagcccagggatcacccggacatgttgcaggctaaactgacgacgtaattgagtttcatattccagacagccttcaaagcgagaattaatctgtacgcgaataatgccggactgatgccctttctccagcaatcggctcactttcaaacgtgtcaggccgagacgatcgctgatctcgctctgggtcagcccgtcgtgatagtaaaaccacgcgatccgcgcgacctgttcttcttcacacattccctgttcactaattgcgctatcgttgattgtcataattcattcttcactttgaacatatttaaatctttaatgcaattgttcagttcttgctcatttatatctgtgatggcaaccacagtttgactctacgagcatgaacaaacgcaaccgtgaaaatcaaaatagcataaattgtgatctattcgtcggaaatatgtgcaatgtccacctaaggttatgaacaaattaaaagcagaaatacatttgttcaaaactcacctgcaaaactgaacgggggaaatatgcaaacgagtgatacccgcgcgttaccgctactttgcgcccgcagcgtttataaacagtatagtggggtcaatgtcctgaaaggcatcgattttacgttgcatcagggggaggtccacgccctgctcggcggcaatggtgccggtaaaagcacgttaatgaagattattgccggtattacccctgctgatagcggtacgctggagattgagggcaacaactacgtcagattaacgccagttcatgctcatcagctgggtatttatctcgttccccaggaaccgctgcttttcccaagcctgagcataaaagaaaacatcctgtttgggctggcaaaaaaacagctctccatgcagaaaatgaagaacttgctggcggcgctgggctgccagtttgatctgcatagtctggcaggaagcctggatgtcgccgatcgccaaatggtggaaatcctccgcgggctgatgcgcgacagccggattctgatcctcgatgaacctaccgccagccttacccctgcggaaaccgaacgcttgtttagtcgcttgcaagagctgcttgctactggcgtgggtattgtttttatcagccataagctgccggaaattcgccagattgccgatcgaattagcgtgatgcgcgacggaaccatcgccttaagcggcaaaaccagcgaactgtctaccgacgacattattcaggccatcaccccagcggtacgggaaaaaagcctctctgccagccaaaaattatggctggagttacctggtaaccgcccacaacatgccgccggaacgccggtgctgacactggaaaatctgaccggcgaaggtttcaggaatgtcagcctgacgctcaatgccggagaaattctgggcctggctgggctggtgggggccggacgcacagaactggccgagacgctctatggtctgcgtactttgcgtggcggacgcattatgctgaatggtaaagagatcaataaattatccactggagaacgtttactgcgcggtctggtttatctgccggaagatcgccagagttccggactgaatctcgatgctagcctggcctggaacgtctgcgcccttactcataaccttcgtggattctgggcgaaaaccgcgaaagataatgccaccctggaacgttatcgtcgggcgctgaatattaaattcaaccaaccggaacaagctgcacggacattatccggtggcaaccagcaaaaaatcctcattgccaaatgcttggaagctagcccgcaagtattgattgtcgatgagccgacgcgcggcgtggatgtcagcgcccgtaatgatatctaccagctgttgcgcagcatcgccgcacaaaatgtggctgtgctgcttatctcctccgacctggaagagatcgaactgatggcagatcgtgtgtatgtgatgcatcagggcgaaattacccactctgcactgaccgagcgcgatattaatgtcgagactattatgcgcgttgccttcggcgatagtcagcgtcaggaggcgagttgctgagctaaagtcagcgtcaggaggcgtcatgctgaagtttattcagaacaaccgtgaaatcacggcactgctggcggtggtgctgctgtttgtattacccggttttctcgaccgccagtatttaagtgtgcaaacgctgaccatggtttatagcagcgcgcaaatcctgatcctgctggcaatgggcgcgacgctggtaatgcttacgcgcaatattgatgttagtgtgggtagcattaccggaatgtgcgcggtgctgttggggatgttactgaacgcaggatatagtctacctgttgcttgtgtcgcgactttactgcttggtttgctcgcgggatttttcaacggtgtcctggtcgcgtggctaaagatccctgccattgttgccacccttggcacgttagggttgtacagaggcatcatgttgctgtggactggcggcaaatggattgaagggttacccgccgaactgaaacagctctccgccccgctgctgcttggcgttagtgcaattggttggttgacgataattctggtggcatttatggcctggctgctggcaaagacggcgtttggacgcagtttttatgccacgggcgataatttacagggcgctcgtcaactgggcgttcgtactgaagccattcgcattgtggcatttagcttgaacggctgcatggcggcactggcgggaattgtgtttgctagccagattggttttatccccaaccagaccggtaccgggctggagatgaaagcaattgcagcctgcgtgctgggcggcattagtttgctcggtggttccggtgcgatcattggtgcggtactcggcgcatggttcctgacgcagatcgatagcgtactggtgctgttgcgcattccggcatggtggaatgattttatcgcgggtctggttctgctggcggtgctggtgtttgatggacgcctgcgttgtgcgctggaacgtaatctacggcggcaaaaatatgcccgctttatgacgccaccgccatccgttaaacccgctagcagtggtaaaaaacgggaggccgcataatgcgtattcgctacggttgggaactggctcttgccgcactgctcgttattgagattgtcgcatttggtgcaattaacccgcgaatgttagatctcaatatgttgctgttcagcaccagtgactttatctgcattggcattgtcgccctaccgctaacgatggtgattgtcagtggcgggatcgatattagctttggtagcaccatcggcctctgcgccattgcattgggcgtactgtttcaaagtggtgtgccgatgccgctggcgatactcctgaccttactgctcggcgcattgtgcgggctgatcaacgccggattaattatctataccaaagttaacccgctggtgattacgcttggcacgctgtatctgtttgccggaagcgctctgctgctttccggtatggccggagcgacggggtacgaaggtattggtggattcccgatggcgtttacagatttcgctaacctggatgtgctgggactccccgttccgctgattatcttcctgatatgtctcctcgttttctggctctggctgcataaaacccatgccggacgtaatgtgtttttgattgggcaaagcccgcgcgtggcgctttatagcgcgattccagttaaccgtaccttatgtgcgctctatgccatgacggggctggcgtctgcggtcgccgctgtgctgctggtaagctattttggtagtgcacgttccgatctcggtgcgagctttctgatgcccgccatcaccgccgtggtgcttggcggggccaatatttatggtggttccggttccattatcggcaccgccattgcggttttattagtgggatatttgcaacaaggtttgcaaatggcaggagtgccaaatcaggtgtccagcgccctttccggtgcgctacttatcgtcgttgtcgtaggtcgttccgttagcctgcatcgccagcaaattaaagagtggctggcgcgtcgggccaataacccattgccataaaggatatcttcatgacacttcatcgctttaagaaaatcgccttacttagcgctcttggcattgccgcaatctctatgaatgtgcaggccgcagagcgtattgcatttattcccaaactggttggcgtgggattttttaccagcggtggcaacggcgcacaacaagcgggtaaagagctgggcgttgatgtgacctacgacgggccgacagaacccagtgtttctggtcaggtacagttgattaataacttcgtcaatcaaggttataacgccattatcgtttctgcggttagccctgatggcttgtgtccggcactgaaacgcgccatgcaacgtggtgtgagagtgctgacctgggactctgatactaaaccggagtgccgctcttactacattaatcagggaacgcccgcccagttaggaggtatgttggtggatatggcggcgcgtcaggtgaataaagacaaagccaaagtcgcgtttttctacagtagccccaccgttacggaccaaaaccagtgggtgaaagaagcgaaagcgaaaatcgccaaagagcatccaggctgggaaattgtcactacgcagtttggctataacgatgccactaaaagcttacaaaccgcagaaggaatattaaaagcgtatagcgatctcgacgccattatcgcccccgatgccaacgccctgcccgctgccgcacaagccgcagaaaacttgaaaaatgacaaagtagcgattgtcggattcagtacgccaaatgtgatgcgcccgtatgtagagcgcggcacggtgaaagaatttggcctgtgggatgtggttcagcaaggcaaaattagtgtgtatgtcgcggatgcattattgaaaaaaggaagtatgaaaacgggcgacaagctggatatcaagggcgtaggtcaggttgaagtcagcccaaacagcgttcagggctatgactacgaagcggatggtaatggcatcgtactgttaccggagcgcgtgatattcaacaaagagaatatcggcaaatacgatttctgatgtgcattacttaaccggagtaagttatggcagatttagacgatattaaagatggtaaagattttcgtaccgatcaaccgcaaaaaaatatcccttttaccctgaaaggttgcggtgcgctggattggggaatgcagagtcgcttaagccggatatttaatccgaaaacgggtaaaaccgtgatgctggcttttgaccatggttattttcagggaccgactaccggacttgaacgcattgatataaatatcgccccgctgtttgaacatgccgatgtattaatgtgtacgcgcggcattttgcgcagcgtagttccccctgcgaccaataggccggtggtactgcgggcgagtggtgcgaactctattctggcggaattaagtaatgaagccgtggcgttaagcatggatgacgccgtgcgcctgaacagttgcgcggtggcggcgcaggtttatatcggcagcgaatatgaacatcagagcatcaaaaatattattcagctggttgatgccggaatgaaagtgggaatgccgaccatggccgtgactggcgtgggcaaagatatggtgcgcgatcagcgttatttcagcctcgcgactcgaatcgccgctgaaatgggggcgcaaattatcaaaacctattatgtcgaaaaaggttttgaacggattgttgccggatgtccggtacccattgttattgctggcggtaaaaaattaccggagcgcgaggcgctggaaatgtgctggcaggctatcgatcagggcgcttctggtgtggatatggggcgtaatattttccagtctgaccatccggtggcgatgatgaaagccgtacaggcggtggttcaccataacgaaacggctgatcgggcatatgaactctatctgagtgaaaaacagtaactgcggatctaaggagaagaattatgcacgtcacactggttgaaattaacgttcatgaagacaaggttgacgagtttatcgaagtttttcgccagaaccacctgggctctgtacaggaagaaggcaatttgcgcttcgatgtcttacaggacccggaagtgaatagccgcttttatatctacgaagcctataaagatgaagacgcagtggcgttccataaaaccacgccccactacaaaacctgtgtcgcgaaactggaatctttaatgaccgggccgcgtaaaaaacgtctgttcaatggtttgatgccgtgaggcgaatttatcaattttatctacaattggggtaacgcgctgacgggagtaaaaaaatgtctgactggaacccctctttatatctacacttttccgctgaacgaagccgtccggcggtggagctgcttgccagagtgccgctggaaaatgtcgaatatgttgccgatcttggctgtggcccaggtaacagcaccgcccttctacaacaacgttggcctgcggccaggataacaggcatcgacagctctccggcgatgattgctgaagcgcgcagtgctttgccagactgccagttcgtggaagcagacatccgcaactggcaaccggtacaggcactcgatctgatttttgctaatgccagtctgcaatggctgcccgaccactacgaattgtttcctcatctggtttctttacttaatccgcagggcgtgctggcagtacagatgccagataactggctggagccgacccatgtgctcatgcgcgaagttgcctgggaacaaaactacccggatcgcgggcgtgagccgttggctggcgttcatgcttactacgatattttgagcgaagccggatgtgaggtcgatatctggcgaaccacctactatcaccagatgccgagtcaccaggcgattatcgattgggtgactgccactggattacgtccgtggttacaggatctgaccgagagcgaacagcagctttttcttaagcgctaccatcagatgctggaagagcagtatccactgcaagagaacggacagatactgctggcatttccgcgtctgtttattgttgcccggcgtatggagtaaatatcacgtcagctggtaatgacgatcgggaagaatttttgctggaatttcggcttcatcgttcatctgtaacaggtcaatttcaatagcgttgcagatggcatccagtggtaaatcattgttttcagtaccgaacggatcttccagttcttccgccagacaatccaggctaataaaagtgtaggaaatcagcacagagataaaaggcgtcatgtaatgcaggtccacgaccagcgcgaacggcagcatgatacaaaacagataaacggtacgatgcaaaatcagggtgtaggcaaagggaattggcgtataggcaatgcgctcgcatcctgccaggaccgcactaatatcattaagccgatcgttgaggctaataaacaggatatcactaagctgtccattgcggcgctgaaccgccaaccattctcccattattaacaagatacggttagctggagagttgctagccagtacacgctgaagatcttcagtcttgagataatgagccagcacttccgcctgtggctgtttgcgtaatgtcatgcgtaaacagtgggcgaaagcgatttgcagccgggcaaactcccttacacttgcgctatccggcaatgtcgtttttacctcgcgcagtaagctccgactggcaatcatcaactgcccccaaagttttcgcgcttcaacgtaacgggcgtacccggcattattacgaaaaccaagaaaaatggcgatggcgacaccgagaatgctgaacggtgcgagggtgaatttgatgcccagatgcgtgtaccagggcagcatgaaaataacagcgatagaaaagagaaaattgagtagtaagcggctggatatcttggataatacactgccgtgccagacaaaaatacggcgcagccagtgttgttgtggacgaacaatcatggttatcttcaggcgtggaaaagtcgccctattaaacgtgattacgatcacattctcaagacgctacttacaaattacctacaagcttacaacattagcaggcgctgcatgtggcacctgttaatgataaaggcatataggatgttgtaactaatatggtgaaataagaaacccggtcgaaaccgggttcagaagtaacggtgttattagcacaacggacgtacagcttcgcgcatccctttttcgagaatcgcatccaggtcattagcaacctgctcgaccagaccaggcacttgcgtcaggtcctgctcccagtggtctttttctgccaaaacaatcgctaccagttcctgggtgccgataacacggtcacgatgctggctccagagttgctgataacgttccagccagtgtgcatcgtcctgtaccggatatgtttcgccgttacgctcaccacgatagaacgcaatcaatgccgctaatgcgaaagtaaggcgcgccggaagtgtgccgtttgccttctgccctgccagcagctgtggcaggatgcgggtgcggaacttggtcataccgttgagcgcgatagacagcagctgatgcttaatgtacgggttacggaaacgcccggtgactgcactggcgaaagattccagttcatcacgaggcaaatccagtaccggaataatttcttcgtagatagctttttcaacgaatgcgcaaatttcagcatcgttcatcgcttcacctacggtatccagccctgcctggaacgccaccggcaccagcgcggtgtgcgcaccgttgaggattgccactttgcgttctttgtacggtttaatatcgtcaacaatcagcacgttgagcggatatttgtccagacgcagttcagtcgctaaggatttcggtccctgaatcacaaacaggtaaaagtgttcagcggtgtcgagaaaaccatcgtgataacccagttcttcttccagtttagccacttcatcgcgcggataaccggtaacgatacggtccaccagcgtagaacagaagctgttagcctgatccagccattgaataaatgcttctggcagtgcccactcttgcgcatagcgcagcaccagttcacgcaacgcgtcgccattgtagtcaatcaactcacacggaatgatgatccaacctttatccagcgcaccgttgaaatggctaaagcgttcgaacagcagacgggtcagttttgccggatagcttaccgctggcgcgtcatcgaatttatcgcccgcatggtagctgatacccgcttcggtggtgttagagaaaacaaagcgcatttccgggttgtgcgccagtttcaggaattcatcgtattcactgtagacgctgatttcacgattaacgctgcgaatcagacgcgcgtcgctgaccgcttcccccttctcattcaggccacggataatggtggtgtacagaccatcctgcgtgctcagactcggcgggaaactagtttcaatcggacgaacaacgaccacgccagaattcagatcggtgtgctcattcaggagatcgatttgccagtcaacaaaggcgcgcaggaagttaccttcaccaaactgaatgatacgttctggatactgtgcaccgggaaaatcgcgacgatttagtgttttcacaatgggttcccttctgattagtcatacaacctgtttgaattggtacgacaggttagcaaactttaatacgccgaacccctgttttgatcaactcctgatgattaatgagcagttttatgagaaaagtgtggcgcggatcatggtttaatcgaggaaaaacgccttttcctggatcataaagtggtagaacacattgcattcaaatcgcgcgtaatgaataaagatgtcagacaacttcctcaccgtaacgcatagtgctggtacggttgcgcccatctttcttgctgcgatacagacacgtatcggcttcgaccatcaatttattaaagtcatcggtcagcgttaggtagcttgcgcgaccactaccgacgccaatacttaccgtgagataaagcgttttttgttgccaggtgaatggttgcagttcaacgcctttacggattttttccgccattagcagaccatcgacaggattcacgctcggcactgcaacagcaaattcttcgccgcccattcgcgccaccagccccttatcaccgacaatcttctgaatatgccgggcaaacacgcttaacactttatcgccacattcatgtccatagttatcgttaatgcttttgaaatagtcgatatcaagcagcatgacagtcagatgttgtgtctgtttcaggcttggacttttcagcgcctcataaagaccggaccgactgtaaacctgagtcagaaaatcaaagtcggctcgcagcgcaacttgcttcattaggctattgatcgctgccacgctaaaagaaaccataattgggcatatcgccatcgtggcaataccgagacgtgcggagaacatttgcggaatggagaacgggctaccgacgctgatatcaatcacgctatttgccaccagtacgatttccaccgcaccggtgacaaaggtcaacagacatgttacctgcggcgtatagcgcactgcacaccagattaatgcaggcagcgggaacgccagactccccgctccgccaatgactacgctggcaataacgctcacaataagcgcgatggcgggcatcatctgttctgctttaaagcgcggcagcactccaggaatagccaacgtcagcatacaaggcacgatcaacacgcccgtactgaattgctcactgaaccagtccgcaagcaaaggccagaaatccagactatcaatactgaccgaaccaagatagcatgttcgctgacagcggcggcaaataaaggtaccctgggaatgctattttgtcgttttccgcaattctcatggctgattcatctgtacaaccagccagtgatagattaccgccacgatataacgttgttgttcttcgcttaagctaacaccctgcggaatgttatgccacttagccagacaaccgcgacagcaggtcgcggtggcgtgctgagcgataaacaccggatgcccgcgcatgggggtttgcttaccgtcattagccggtaatgccggagcaagacgtttagcgacaaaatccgccgcatgttgttcgatgactggcgcgcctttctccaggcaatactgacgctctttcatgcccagacgaaagcgagagcgaaatttactacgggataaacgcgcgaagagtggatcgagagactgcattaataaacgctacgccctaactgtttcgtcaattgttcaagaacggcaatacccgcaaggctgttacctgcatcatccagttccggactccagacagcgatggccatttcatgcggaacaatcgccacaataccgccaccaacgccagatttcgccggtagccccacccgccaggcaaactcccccgcgttctggtacataccactggtcgccatcagcgcgttaatttgccgcgcctgcattggcgtcaccactggttcatcaatatgaatagctttcccctgattagccagaaagacaaacgtccgggccagctctacacagctcattttcagagcgcagtaatgaaagtagttttgcagaacggttgtcacgtcatgatggaaattgccaaagctcttcatcagccaggcgatagccgcatttcgcgcggaatgttcaaattcggaacgcgctaccaccgtatcgtaggaaatatcagacacaccgcttaagccgcgcacgacttccagcatacgttgccgtggtgcgcttaatcgcccttgcaacatatcgcagaccaccagcgcaccggcattaatgaacggattacgcggtataccctgctccatttccagttgcactaaggaattgaacggacttccagacggatctttgccgacgcgttgccagatttcctcttcggagtaatgacgcatggcgacaacgagactcagcactttggaaatagactgaatggaaaaacgttcttgcgcgtctccggcctgaaaaagctgtccgtcaacggtacagatagcaatccccaatcgggaaccgtctactgtagccagcgccggaatataatccgcgactttaccctgaccaatgagcggccgcacttgccgcaagatgttttctaaaattgcattatccatggcgactgccactttctactcctggaccgcaggtctgaaaagacctgcgagtatatcagagctgaatatgtcgcgtcagatccggtctttccacaccgtctggatattacagaattcgtgtaagccgaaatgggaaagctcacgaccaaagccactctttttcacgccaccaaaggccactcgcgcgtcgctggcacaataaccattgataaacaccccaccgcattccagacgtgccgccatctgtctggcctgtgtttcgtcagtggtaaaaatggtcgcactaaggccgaactcactatcattagccagttccagtgcatgttctgcatctttcgcaatggtgattgccgcaacggggccaaacatttcttcccgaaacgcggtcatttctggggtaacattcgccagaaccgttggcggatagtagttacctgccccagccatcttttccccgcccagtaacaaacgcgcaccctgcgccagggttttctccacctgatgatgcagctcatcacgtaaatcaaaacgagccattggtccgagagcgttctcttcgtcacggggatcgcccattttcaaggctgccgcagctgccacaaaacgttcggtaaatgcgctagcaattccctcttcgataataaagcgttttgccgctgcacatacctgtccggtattctgataacgtccggctaccgccgctttcaccgccagttccagatcggcatcgttaagcacaataaacggatcgctaccgcccagttccagtacgcattttttcagtgccgctccagcctgtgcgccaatagccgctcccgcacgaacacttccggtcaccgtgacagcagcaatgcggctgtctttaatcatctgactgacaccgtcgttgtcggcattcagccagccatatacgccttgtgggatacccgcatctttaaacacctgggcaatgagctgtgcacagcccatcacattcggcgcatgtttaagtaagtagccgttacctgcaagaatgatgggaacagcgccacgcatcacctgccataacggaaaattccacggcataatcgccagaatcgtccccaacggtcgatactcaataaccgcctgctgattttccaccagcgtaggttccgccttcagcattgccggaccatgttctgcataccagtcacacaaattcgcgcttttcgccacttcagcgcgcgcctggttgattggtttgcccatttcgcgggtgatcatttgcgccatttcttcgctacgagcgcgcagagccttaccgatatcacgcagtttttcagcacgataatctatatttgtctcgcgccagtcgcgaaagcctgctgccgccagctgaagtgcgttttcgatatcgtcagcgccagcccacggcagcacagaaagttgttcacccgtggcaggatttatgctaattgcatgagttgccggagtaatggtcatcggggtatctcctttatgagtcatggtatgaagatacgcagatttactcttgctttaaaatgaataatattaagccacttattcacgaatcgagaatgctatggatctgacccaactggagatgttcaacgcggttgccgaagctggcagcataacccaggctgcagcaaaagtgcatcgcgtgccgagcaatctcactacccgtctgcgccagctggaaacagaactgggggttgatctgtttattcgcgagaatcagcgtttacgtctctctcctgccgggcataactttttacgctatagccaacaaattctcgcgttagtggatgaagcgcggagcgttgtcgctggcgatgagccgcaaggtttattttctcttggtagcctggaaagcaccgctgcagtgcgcattccagccacgctggcggaattcaaccgtcgttatcccaaaattcagtttagtctttccaccggcccttccggcactatgctggatggtgtactggagggaaaactgaatgcggcgtttattgatggacccattaaccatactgccatcgacgggataccggtataccgcgaggaactgatgatcgtcacgccacaaggatatgcgccagtaacccgtgccagtcaggttaatggcagtaacatttatgccttccgcgccaattgtagctatcgtcgccacttcgagagctggtttcatgctgacggtgccgctccgggaactatccatgagatggagtcttatcacggaatgttggcctgtgtgatcgcaggagcaggcattgcgcttattccgcgctctatgctggaaagtatgccggggcatcaccaggttgaagcgtggccgttagctgagcaatggcgttggttaacaacctggctggtctggcgtcgtggtgcgaaaacacgtccgctcgaggcatttattcaactgctggatgtgcctgacagcgcaagacagggatatcaatgagctatttttgatagttcttgcggttaatatgctctatatagtgatgttccgatgacttatgactatatggggcaaatatggttacgccagtaagcatcagcaattacatatctcttcctgatgattttcccgtacgtaatattgcaccgcaggtaaaagaagttttaaaggattttattgatgcacttagtacaataatatgtaatgaagagtggcgcacgtctttaaacatcaacagtgccacaaaaaagatatttaataaccttgacaacttaagttatattcagaggacttcttttcggggtaacgacacgctatacaatgaaaaggttcagtttaaactcacttatcccgccaggaatggaagacacaaagaaaatattgaatttcaggtagtaataaatttaagccctatttatttagataattttcgccatgatggagaaattaatattttttgcgctcccaacccaaagcctgtcactatggggcgcgtatttcagaccggcgtcgagcgtgtactctttctgtttctgaatgattttattgaacaatttccaatgatcaaccctggtgttcccatcaaaagagcgcatacaccacatattgaacccctgcctagcgatcaccataccgctgcagattacttacgccagtttgatttgcttgtcctgaattttatctctcgcggtaattttgtcatactcccccgattatggaataactctgaggttcacagatggttcgtcaataaagatcctaacttgatcaccgccattctcgacataacggacagcgaattaaaagaggatttgttgcaaagcctgatggatagtttaggttctaacaaacatgtactacccgaagtctgcatctgctttttatcccttttagcagaacaagaatctcctcattttcagaacttgtttttatttttcgccaatatgttattgcactatcaccaatttatgaatcccaatgaaagtgatttgaatgacgtgttgatgccagcaagtttaagtgatgataaaattatcaaacatatggcgcgcaggaccctcaaactgtttgtaaaaaatgaaacaccgccaaaagttactcacgaagacctggtgaaaaacaggcctcgctcccctgtcagaccacctatacccgcaaccgccaaaacgccagacctccctgaacgtcattaaaccgtgatgttaccgactctctgacgcgtgaaagaatcagcgtcagagaaacggaaaacgcgatccagatcacaaatgcattgtattcacatcattaaccgttttaagatcatttcatcactttttcgcaactcacccgataatctgttatgacaacaaacactgtttcccgcaaagtggcgtggctacgggtcgttacgctggcagtcgccgccttcatcttcaacaccaccgaatttgtccctgttggcctgctctctgacattgcgcaaagttttcacatgcaaaccgctcaggtcggcatcatgttgaccatttacgcatgggtagtagcgctaatgagtttgccttttatgttaatgaccagtcaggttgaacggcgcaaattactgatctgcctgtttgtggtgtttattgccagccacgtactgagctttttgagctggagctttaccgttctggtgatcagtcgcattggtgtggcttttgcacatgcgattttctggagcattacggcgtctctggcgatccgtatggctccggccgggaagcgagcacaggcattgagtttaattgccaccggtacagcactggcgatggtcttaggtttacctctcgggcgcattgtgggccagtatttcggttggcgaatgaccttcttcgcgattggtattggggcgcttatcacccttttgtgcctgattaagttacttcccttactgcccagtgagcattccggtagtctgaaaagcctcccgctattgttccgccgcccggcattgatgagcatttatttgttaactgtggtggttgtcaccgcccattacacggcatacagctatatcgagccttttgtacaaaacattgcgggattcagcgccaactttgccacggcattactgttattactcggtggtgcgggcattattggcagcgtgattttcggtaaactgggtaatcagtatgcgtctgcgttggtgagtacggcgattgcgctgttgctggtgtgcctggcattgctgttacctgcggcgaacagtgaaatacacctcggggtgctgagtattttctgggggatcgcgatgatgatcatcgggcttggtatgcaggttaaagtgctggcgctggcaccagatgctaccgacgtcgcgatggcgctattctccggcatatttaatattggaatcggggcgggtgcgttggtaggtaatcaggtgagtttgcactggagtatgagcatgattggttatgtgggcgcggtgcctgcttttgccgcgttaatttggagtatcattatatttcgccgctggccagtgacactcgaagaacagacgcaataattgaaaggcccattcgggccttttttaatggtacgttttaatgatttccaggatgccgttaataataaactgcacacccatacataccagcaggaatcccatcagacgggagatcgcttcaatgccacccttgcccaccagccgcataattgcgccggagctgcgtaggcttccccacaaaataaccgccaccaggaaaaagatcagcggcggcgcaaccatcagtacccaatcagcgaaggtactactctgacgcactgtggacgcgctgctaataatcatcgctatggttcccggaccggcagtacttggcattgccagcggcacaaaggcaatattggcactgggttcatcttccagctcttcgctcttgcttttcgcctccggactatcaatcgctttctgttgcggaaagagcatccgaaaaccgataaacgcgacgattaagccgcctgcaattcgcagaccgggaatgctaatgccaaatgtatccatcaccagttgcccggcgtaatacgccaccatcatgatggcaaatacgtacacgctggccatcaagctctgacgattacgttcggcactgttcatgttgcctgccaggccaagaaataacgcgacagttgttaatgggttagctaacggcagcaacaccaccagccccaggccaattgctttaaacaaatctaacattggtggttgttatcctgtgtatctgggttatcagcgaaaagtataaggggtaaacaaggataaagtgtcactctttagctagccttgcatcgcattgaacaaaacttgaaccgatttagcaaaacgtggcatcggtcaattcattcatttgacttatacttgcctgggcaatattatcccctgcaactaattacttgccagggcaactaatgtgaaaagtaccagcgatctgttcaatgaaattattccattgggtcgcttaatccatatggttaatcagaagaaagatcgcctgcttaacgagtatctgtctccgctggatattaccgcggcacagtttaaggtgctctgctctatccgctgcgcggcgtgtattactccggttgaactgaaaaaggtattgagcgtcgacctgggagcactgacccgtatgctggatcgcctggtctgtaaaggctgggtggaaaggttgccgaacccgaatgacaagcgcggcgtactggtaaaacttaccaccggcggcgcggcaatatgtgaacaatgccatcaattagttggccaggacctgcaccaagaattaacaaaaaacctgacggcggacgaagtggcaacacttgagtatttgcttaagaaagtcctgccgtaaacaaaaaagaggtatgacgatgtccagacgcaatactgacgctattaccattcatagcattttggactggatcgaggacaacctggaaagcccactgagtctggagaaagtgagtgagcgtagcggttactccaaatggcacctgcaacggatgtttaaaaaagaaaccggtcatagtttaggccaatacatccgcagccgtaagatgacggaaatcgcgcaaaagctgaaggaaagtaacgagccgatactctatctggcagaacgatatggcttcgagagccaacaaactctgacccgaaccttcaaaaattactttgatgttccgccgcataaataccggatgaccaatatgcagggcgaaagccgctttttacatccattaaatcattacaacagctaattgaaaacgtgacaacgtcactgaggcaatcatgaaaccacttagttccgcaatagcagctgcgcttattctcttttccgcgcagggcgttgcggaacaaaccacgcagccagttgttacttcttgtgccaatgtcgtggttgttcccccaagccaggaacacccaccgtttgatttaaatcacatgggtactggcagtgataagagcgatgcgctcggcgtgccctattataatcaacacgctatgtaatttgttctggccccgacatctcggggcttattaacttcccacctttaccgctttacgccaccgcaagccaaatacattgatatacagcccggtcataatgagcaccgcacctaaaaattgcagacccgttaagcgttcatccaacaatagtgccgcacttgccagtcctactacgggcaccagtaagcttaacggtgcaacccgccaggtttcatagcgtcccagtaacgtcccccagatcccataaccaacaattgtcgccacaaacgccagatacatcagagacaagatggtggtcatatcgatagtaaccagactgtgaatcatggttgcggaaccatcgagaatcaggctggcaacaaagaagggaatgattgggattaaagcgctccagattaccaggctcatcaccgccggacgcgtactgtggctcatgatctttttattgaagatgttgccacacgcccaactaaatgctgccgccagggtcaacataaagccgagcatcgccacatgctgaccgttcagactatcttcgattaacaccagtacgccaaaaatcgctaaggcgatccccgccaattgtttgccatgcagtcgctccccgaaagtaaacgcgccaagcatgatagtaaaaaacgcctgtgcctgtaacaccaggctagccagtccagcaggcataccgaagttaatggcacaaaaaagaaaagcaaactgcgcaaaactgatggttaatccataccccagcagcaaattcagtggtactttcggtcgtgcgacaaaaaagatagccggaaaagcgaccagcataaagcgcaaaccggccagcatcagcggtggcatgttatgaagccccactttgatgaccacaaaatttagcccccatacgaccactaccagtagcgccaacaccccatcttttcggctcattctaccgcctctgaatttcatcttttgtaagcaatcaacttagctgaatttacttttctttaacagttgattcgttagtcgccggttacgacggcattaatgcgcaaataagtcgctatacttcggatttttgccatgctatttctttacatctctaaaacaaaacataacgaaacgcactgccggacagacaaatgaacttatccctacgacgctctaccagcgcccttcttgccagcagcttgttattaaccatcggacgcggcgctacgctgccatttatgaccatttacttgagtcgccagtacagcctgagtgtcgatctaatcggttatgcgatgacaattgcgctcactattggcgtcgtttttagcctcggttttggtatcctggcggataagttcgacaagaaacgctatatgttactggcaattaccgccttcgccagcggttttattgccattactttagtgaataacgtgacgctggttgtgctcttttttgccctcattaactgcgcctattctgtttttgctaccgtgctgaaagcctggtttgccgacaatcttagctccaccagcaaaacgaaaatcttcagtatcaactacaccatgctaaacattggctggaccatcggtccgccgctcggcacgctgttggtaatgcagagcatcaatctgcccttctggctggcagctatctgttccgcgtttcccatgcttttcattcaaatttgggtaaagcgcagcgagaaaatcatcgccacggaaacaggcagtgtctggagcccgaaagttttattacaagataaagcactgttgtggtttacctgctctggttttctggcttcttttgtaagcggcgcatttgctagttgcattagtcaatatgtgatggtgattgctgatggggattttgccgaaaaggtggtcgcggttgttcttccggtgaatgctgccatggtggttacgttgcaatattccgtgggccgccgacttaacccggctaacatccgcgcgctgatgacagcaggcaccctctgtttcgtcatcggtctggtcggttttattttttccggcaacagcctgctattgtggggtatgagtgctgcggtatttactgtcggtgaaatcatttatgcgccgggcgagtatatgttgattgaccatattgcgccgccagaaatgaaagccagctatttttccgcccagtctttaggctggcttggtgccgcgattaacccattagtgagtggcgtagtgctaaccagcctgccgccttccagcctgtttgtcatcttagcgttggtgatcattgctgcgtgggtgctgatgttaaaagggattcgagcaagaccgtgggggcagcccgcgctttgttgatttaagtcgaacacaataaagatttaattcagccttcgtttaggttacctctgctaatatctttctcattgagatgaaaattaaggtaagcgaggaaacacaccacaccataaacggaggcaaataatgctgggtaatatgaatgtttttatggccgtactgggaataattttattttctggttttctggccgcgtatttcagccacaaatgggatgactaatgaacggagataatccctcacctaaccggccccttgttacagttgtgtacaaggggcctgatttttatgacggcgaaaaaaaaccgccagtaaaccggcggtgaatgcttgcatggatagatttgtgttttgcttttacgctaacaggcattttcctgcactgataacgaatcgttgacacagtagcatcagttttctcaatgaatgttaaacggagcttaaactcggttaatcacattttgttcgtcaataaacatgcagcgatttcttccggtttgcttaccctcatacattgcccggtccgctcttccaatgaccacatccagaggctcttcaggaaatgcgcgactcacacctgctgtcacggtaatgttgatatgcccttcagaatgtgtgatggcatggttatcgactaactggcaaattctgacacctgcacgacatgcttcttcatcattagccgctttgacaataatgataaattcttcgcccccgtagcgataaaccgtttcgtaatcacgcgtccaactggctaagtaagttgccagggtgcgtaatactacatcgccgattaaatgcccgtaggtatcattaaccaatttaaatcggtcaatatccaacaacattaaataaagattcagaggctcagcgttgcgtaactgatgatcaaaggattcatcaagaacccgacgacccggcaatcccgtcaaaacatccatattgctacggatcgtcagcaaataaattttgtaatcggttaatgccgcagtaaaagaaagcaacccctcctgaaaggcgtcgaaatgcgcgtcctgccagtgattttcaacaatagccagcattaattcccgaccacagttatgcatatgttgatgggcagaatccattagccgaacgtaaggtaattcatcgttatcgagtggccccagatgatcaatccaccgaccaaactggcacagtccataagaatggttatccgttatttctggcttactggcatctctcgcgaccacgctgtgaaacatactcaccagccactggtagtgggcatcgatagccttattgagatttaacaagatggcatcaatttccgttgtcttcttgatcattgccactcctttttcacagttccttgtgcgcgctattctaacgagagaaaagcaaaattacgtcaatattttcatagaaatccgaagttatgagtcatctctgagataacattgtgatttaaaacaaaatcagcggataaaaaagtgtttaattctgtaaattacctctgcattatcgtaaataaaaggatgacaaatagcataacccaataccctaatggcccagtagttcaggccatcaggctaatttatttttatttctgcaaatgagtgacccgaacgacggccggcgcgcttttcttatccagactgccactaatgttgatcatctggtccggctgaacttctcgtccatcaaagacggccgcaggaataacgacattaatttcaccgctcttatcgcgaaaaacgtaacggtcctctcctttgtgagaaatcaaattaccgcgtagactaacgctagcgccatcgtgcatggtttttgcgaaatcaacggtcattttttttgcatcatcggttccgcgatagccatcttctattgcatgaggcggcggtggcgctgcatcctgttttaaaccgccctggtcatctgccaacgcataaggcatgacaagaaaacttgctaatacaatggcctgaaatttcatactaactccttaattgcgtttggtttgacttattaagtctggttgctatttttataattgccaaataagaatattgccaattgttataaggcatttaaaatcagccaactagctgtcaaatatacagagaatttaactcactaaagttaagaagattgaaaagtcttaaacatattttcagaataatcggatttatatgtttgaaaattattatattggacgagcatacagaaaaagcaaatcacctttacatataaaagcgtggacaaaaaacagtgaacattaatagagataaaattgtacaacttgtagataccgatactattgaaaacctgacatccgcgttgagtcaaagacttatcgcggatcaattacgcttaactaccgccgaaagttgcaccggcggtaagttggctagcgccctgtgtgcagctgaagatacacccaaattttacggtgcaggctttgttactttcaccgatcaggcaaagatgaaaatcctcagcgtaagccagcaatctcttgaacgatattctgcggtgagtgagaaagtggcagcagaaatggcaaccggtgccatagagcgtgcggatgctgatgtcagtattgccattaccggctacggcggaccggagggcggtgaagatggtacgccagcgggtaccgtctggtttgcgtggcatattaaaggccagaactacactgcggttatgcattttgctggcgactgcgaaacggtattagctttagcggtgaggtttgccctcgcccagctgctgcaattactgctataaccaggctggcctggcgatatctcaggccagccattggtggtgtttatatgttcaagccacgatgttgcagcatcggcataatcttaggtgccttaccgcgccattgtcgatacaggcgttccagatcttcgctgttacctctggaaaggatcgcctcgcgaaaacgcagcccattttcacgcgttaatccgccctgctcaacaaaccactgataaccatcatcggccaacatttgcgtccacagataagcgtaataacctgcagcatatccgccaccaaaaatatgggcgaaataactgctgcgatagcgtggcggtatagcaggaagatccatattttccgccaccagcgcccgcaattcaaaatcatcgacatcctgcattgcttcgttttcttccaggcaatgccagcgcatatcgagaagtgcggcgctaagcagttcgctcatctcataccctttgttgaacaggctggcattacgcattttctgttgcagttcgtcaggcattgctgccccgctctgataatgccgggcgtagcgagcgaatacctgcggatgcgttgcccagtgttcgttgatttggctcggaaattcgacaaaatcacgcggcgtgttggtgccggaaagcgtggcataacgctggcgggcaaaaaggccgtgcagcgtatgaccaaattcatggaataaggttatgacatcatcccagagtaacaacgcaggctcaccggcagcgggtttctgataattgcagacgttataaattaccggatgtgttttattaagcgtactttgctcaacaaaattgcccatccatgcaccgccgcttttactatcacgggcgaagaaatcaccgtaaaataacgccagccccacgccattatgatcaaaaatttcccacacacgaacgtcaggatggtagacaggaatatcaaaacgttcgacaaacttaataccgaagagctgattcgcggtccagaatacaccttcatttaacaccgtgtttaattcaaaatatggcttgagctgcgcctcatcaagatcaaatttctcccgccgtacctgttccgcataaaatgcccagtcccacggctgcgcgctaaacccgccctgctgcttatcgataaccgcctgtatggaggctaattcatcgctcgcacgttgacgcgccgctggaacaatttcccgcataaagttaagtgctgcttcaggtgtttttgccatctgatcggcgattttccatgcggcataatgaggaaaaccaagtagtgttgcctgttgtgcacggatctccaccagacgttgaatgatagcgcgggtatcattggcatcatttttttccgctcgcgtccagcccgcaataaacagtttttcacgcgtcgcacgatcgcgcatttcggcaagcgccggttgttgggtggtattcagcagcggaatcagccatttgttatccagacctttctcgcgagccgcctctgccgccagcgcaatctcttgctcactcattcctgccagctgcgcgatatcgttcacaaccagaccgccggatttatttgctgccagtaatcgctggttaaactggctggtcagggtcgcagcttctgtattcagtacttttaattttgctttatcagcttgcgcaagtttggctccggcaaggacaaaacgttgatgaatcacctccaccaggcggatggattcactatcaagccccagggattcacggcgctgccagacagcatctacccgcgcgaataattcaccgttcagatagatatcattagccagttccgccagttcagcggaaaactgctcgtcaagacgctgtaattcatcattggtatgcgccgcagtcatcgcaaaaaagacgctggtaacgcgggtaagtaattctccgctttgttccagtgccagaatagtattgttgaaatcaggcatttgcgggttaagcgcgatggcagcaatttctgcccgcttttgctgcattccctcatcgaatgccgggcgatagtgatgattggcaatttgatcaaaatggggagccagatacggcagtgtgctttgcacaaggaaaggattcattgttgtcattttcttctcctgaacgcgaggtgttccatagcgtaggcttactgataacggagtgcaatcttgcaatccagtattacccgctcttaagcatcccgtgctatgttattgacacacaaaagcgttgaggaacagtgagaagcgcagtgcccagccatcccgatactgctgctttcaccaaatccttagtgcttctttcgtgtttttctattgtcataatggttatctctaaaaaagaggtaagatgcgtactacttactcgccgttattggtattattcagaaaaagtgagtaagactttgcagcaatgtttttgatcctgttcaaataaactaatggcatcagcaacatgctggaaatcaaacgtatgggtaattaatttttctggtttaattaaccctttacttaaccagtcgataacgatcgggaatttatttgcatttaagcgactagagaaaatagagagttcttttccggtaattccttgctgaatcacttcagacggttcactggagaaccccatcaatacaatacgtgccgctggagaagccagcgttacggcctctttcaggatagaaggatgacaagccgcatcgataattaatgtcggcttgatgcctttttcagtgaaaatctcgccaagcggtgtctggctgttattaatcgcccagtcagccccgctctctttcgctttttccagtcgttcatcaatgcgatcggcaacaatcacatttttaacgttatagacgccttttaatacctgaacgatcgtcaggccgattggaccggcaccataaaccagaacggtatcattttcagtcggttgaccatgtccggttacgttagccgcaatggtaaaaggttcgatcattaccgcatattgatcggccactgcttcaggaattttccacgcattttttgccggaaccacggcatattcactgaaaccaccgtcagcgtgcacacctaatacagccagtgtcgtacaaacgttcggtttacctatagagcacggatagcaatgcccacagctgaccaccggatcgacagcaacacgttcaccgactctggcgctttccacgccttcacccactgcatcaatgacgccaaagaattcatgaccaatgacgcgcggatatttcgcaaaaggattatgcccacgataaatatggctatcactaccacaaattccggcaagtttcacttttactcgtacttcacccgcactcggggtgggtatttcacgttcgacaatcgccagttgattcggtttttcaattaatatgcttttcattatcttactccttaccagttccacagcgtgccatcttccagacgtgcgactggtagataagcaggttcatagggatatttcgccgccagcttttcatcgaattcgataccaagacccggtttgtctcccggatgcatatagccgttatcgaaagtccagttgtgcgggaagacttcgagcatttgttcggaataacccatgtattcctggacaccgaaattggggacccacagatcaaagtgcagcgccgcagccatgcagactggactcaaatcggaaggaccgtgactgccagtacgtacctgatacaggctagcaaaatcggcaatccggcgcataccggtaattccgcctgcatgggtcagcgtggtgcggatataatcgatgagttgctcttcaatcagttgtttgcagtcccagatgctgttgaagacttcacccactgcgatgggtgtgacggtatgttggcgaatgagacggaagcattcctggttttccgcaggcgtcgggtcttccatccagaacatgcgataatcttcaatgcttttaccaaagcgcgccgcttcaataggcgttaagcgatggtgcatgtcatgcagcaaatgttcattaaaaccaaacttgttacgtaccgcgtcaaacaatttcggcatgaaatcgaggtatttctccgtgctccacagctgctcttccggccactgtcctttggttgcgggttcataagccagacctttacctttgctcatgccgtaggtggttttcataccagggattccgcactgcacgcggatggctttgaatccaagctcttgatgacgggcataatcatccagagcttcatcaatactgtgaccggtggtatggcaataaaccatcaccccttcacgagacgcgccgccgagtaactggtaaagcggcatgttggcagctttggctttaatatcccacagcgccatatcaaccgcactaatggcgctcatcgtaaccggaccgcgacgccagtaagcacctttatagaaaaactgccagatatcttcgatacggtgcgcatcgcgaccaataagctgcggacaaaggtgatcctgcaaataagaggccacggaaagctcacgtccattgagggtggcatccccaaggcccgtaataccgtcctcagtggtgatttttaatgtgacgaaattacgccccggacaggtaacaaaaacttcagcctttacgatcttcatgttcgattccttgcatcgcttgtcgtgatgcatgaaatctacgcaactgagctactaccatacaagtataaagatcgaaaaaagccggagtgatcacaaaaaaaggcgtatatttgcgctgtgaatggttgacaaaagatgaaatagaataccttttgtcagctgacacttcctcttatcttattgataaaatggatttatgttcttacgtgcgcccccagcccgcaacaatgatcaacatgccgcaaagcgcaatcaacgcacccgtccagtcataaagagtcagtttcacgccatccacaacgcgcagccacatcaacgccgtgcagacataaacgccaccataagccgcgtaaacacgcccactcgccgctggatgcaacgttaacaaccagacaaacagcgccagactaatccccgccggaagcaacagccagatactggcgtttcgttttaaccacaaccagggcagaaagcatccaataatttcacacagcgcagtagcaaaaaatagtaacgttgttttaatcatctttgtctcttattgacatcatgtatagttatagggcgacataatatcatcaatataaacaccctcctggtacgttttgcgtccgcagtggatggtgtagaatcacctttaatcattcatacagggaatgaattatgaaaatcactctcagcaaacgaatcggcctgctcgctattctgctgccttgcgcactggcattgagcacaactgttcatgccgaaactaacaaactggtgattgagtctggcgacagtgcacaaagccgccagcacgccgctatggaaaaagagcaatggaatgacacgcgcaatctgcgccagaaagtgaataaacgcactgaaaaagagtgggataaagccgacgccgcttttgataaccgcgataaatgtgagcaaagcgccaacatcaatgcctactgggagcccaatactttgcgctgcctggaccgtcgaactggccgcgttattaccccctaacctgttattgatttaaggaatgtaaggacacgttatgccaagcgcccacagtgttaagctacgcccgctggagcgtgaagatttacgctatgtacatcaactcgacaataacgccagtgtgatgcgttactggtttgaggaaccctacgaagcctttgttgaactctctgatctgtatgataagcatattcacgatcagagcgaacggcgctttgtggtggaatgtgacggcgaaaaagccggtctggtggagctggtggaaattaaccatgttcatcgccgcgcagaatttcagataattatctccccggagtatcaggggaaaggtctggcaacccgtgccgccaaattagcaatggactatggctttaccgttctcaatctctataagctgtatctgatcgttgataaagagaatgaaaaagcgattcacatttaccgcaagcttggctttagcgttgaaggtgaattgatgcacgagttctttattaatggtcaatatcgtaatgccattcgcatgtgtatattccagcatcagtatctggcagagcacaaaacaccgggtcagactctcctgaagccgaccgcacaataacattaataataatcgatcgtatttttgatggtgtaaacccgttcgacggcgggttttactccttcatcaacaatgattagctgacagtccaccggattagcgtgactgtcatattcacagctctgttttacattaccaacccgttgattattcagtaaagtaaccgctgtgtaatctaattttttgatcggatccgtacttggcgtggcgctgacagataatgttttgtcgttacttttcgtggttttacccagcggataaccctgatcatcatagcgatattccatctgcatttgtttgctgctggctttaatcacgaagccattatcatcggtttcccaactcaccccggcagaaggtaattctgctagctggcattttccctgtaaacgtactctcttctccagcgtctcggcatcacggtaataattggcgtccagtaccagagcgaccacggtattattttccagatccagtaattcgagactatcaaaacagccttcttcgctcaaagtcccagaaacacgtttcgtcacttcaccttgctcatccattaatgtctgagtgaaatcttttaccggaccacgcagcggatcaaaatcgaattcattagagaaactggccatctcaggggtaaaactaagtgttacctctgtgcggtcacatcctgtgaggaatatcgcgagtaagcatggtagtaatttgtatttcacaacagtcaccagagagtagagatgattctcaatcatagtagcaaatacagtactttacacgttaaatgctatgcttaaagaagttatcttcgcgtaaggagcttatgatgaaactcagtacctgctgtgccgcgcttctgctcgccctcgccagtcccgcggtactcgccgcgccgggatcctgtgagcgcatacagagcgatataagtcagcgcattatcaataatggcgtacccgaaagcagcttcacgttaagtattgtacccaatgaccaggttgatcagcctgattcccaggtcgtcggccattgcgctaatgatacgcataaaattctctatacccgcaccaccagcggtaacgtctctgctcccgcgcagtctagccaggatggcgcgcctgccgaaccgcagtaacacattatcgactgaacgccggatatgacaaatccggcgatttgaacatacaacataatcccaccttattactcatacccttctattgatatggattaataattcttaacccaaaatgggtagactccctctattgttagcgcgctaaatattcaatatataaacttttatataacgataaagaacagggagtgagttatgtccaaaaatgaacgaatggtgggcatcagccgcagaacactcgttaaatctaccgcgataggttctctggcgctggctgcaggcggtttttctttgccgtttaccctgcgcaatgcagcagcagcggtacaacaggcccgcgaaaaagtggtctggggtgcctgttccgtcaactgtggtagccgctgtgcacttcgtctacatgttaaagataatgaagtgacctgggtggaaactgacaataccggcagcgatgagtacggcaaccatcaggtacgcgcctgtttgcgcggtcgctccatccgccggcgtattaatcatcccgatcgcttgaattacccaatgaaacgcgtgggcaaacgcggcgaaggcaaattcgaacggattagctgggatgaagccctggatactatcgccagtagcctgaagaaaaccgtcgaacaatatggcaatgaggctgtatatattcagtactctagcgggatcgttggcggcaatatgacccgctctagcccaagtgccagcgcggtcaaacgcctgatgaactgctacggcggtagtctcaaccagtatggctcctacagcactgcgcaaatttcctgtgccatgccctacacctacggcagtaatgatggcaacagcaccacggatattgaaaacagcaagctggtcgtgatgtttggtaacaacccggcagaaacccgcatgagcggtggtggcatcacttatcttcttgaaaaagcgcgcgagaaaagcaacgccaaaatgattgttatcgatccgcgatataccgatacggctgccggtcgtgaagacgaatggctccctattcgcccgggcaccgatgccgcgctggttgcgggtattgcctgggtattgattaacgaaaatctcgttgatcaaccttttctcgataaatactgcgtcggctatgacgaaaaaaccttacccgcagatgcacccaaaaatggtcactataaagcctatattcttggtgaaggtgacgataaaacagcgaaaacgccgcagtgggctagccaaattaccggtatcccggaggaccgtatcatcaaactggcgcgtgaaattggcacagcaaaacccgcttatatctgccagggctgggggccacaacgccaggcaaacggcgaactgactgcacgcgctattgctatgttacctattttgacgggcaatgtcggcatcagcggcggaaatagtggcgcgcgtgaaagcacctataccattaccatagaacgcctgccggtgctggataatccggtcaaaacgagtatctcctgcttcagctggacagatgctatcgatcatggtccgcaaatgacggcaatccgcgacggcgtccgcggcaaagataaactggatgtgcccattaagttcatctggaactacgcgggaaataccctcgttaatcagcattctgacatcaacaaaacgcatgaaattctgcaggacgaaagcaaatgcgaaatgattgtggtcatcgaaaactttatgaccagtagcgcaaaatatgccgacattctgctgccagacctgatgaccgttgagcaggaagatattattcctaacgactacgccggtaacatgggatatctcattttcctccagcctgtcaccagcgaaaaattcgaacgcaaaccgatttactggatcctgagtgaagtcgcgaaacgtcttggacctgacgtctatcaaaagttcacagaaggtcgcacgcaggaacaatggttacaacatctgtacgccaaaatgcttgccaaagatccggcgttaccgtcttacgacgaactgaaaaaaatgggtatctataagcgtaaagatcccaatggccattttgtcgcctacaaagcatttcgtgacgaccccgaggcaaatccacttaaaacgccttccggtaagattgaaatttattccagcaggctggcggaaattgcccgtacctgggaactggaaaaagatgaagtgataagcccattgccagtttatgccagtacctttgaaggctggaactcccctgaacgtagaaccttcccactgcaactgtttggtttccattacaaatcccgtactcacagcacctacggcaatattgatctcctgaaggctgcctgccgtcaggaggtgtggatcaaccctatagatgcgcagaaacgtgggattgccaacggcgatatggtgcgggtgtttaaccatcgtggcgaagttcggctaccagccaaagtaacaccacgtattctccctggagttagcgctatgggccagggagcctggcacgaggccaatatgtctggcgataaaatcgaccatggcggctgtgtgaatacgctaaccactctgcgccctagtccactggcgaagggaaacccgcagcacactaatctggtcgagatcgaaaaaatataacccacgacaaccataaattctggcatgacattttgtttgaaaagcaataagtgagtaatgatgaaaatccataccacagaggcgctcatgaaggctgaaatcagccgtagaagtctgatgaaaacctccgcacttggcagtcttgcgctggcaagcagtgctttcactctgccattttcccaaatggtccgggcggcagaggctccggtagaagagaaagcggtctggagttcctgcaccgttaactgcgggagccgctgtctgttacgtttgcatgtgaaagatgacaccgtgtactgggtggagtctgatacgacaggtgacgacgtctacggtaatcatcaggttcgagcgtgtttacgcgggcgctctatccgccgacggatgaatcatcctgataggttgaaatatcccatgaagcgcgtcggcaagcgcggtgaaggtaaatttgaacggataagttgggacgaagccctggataccatcagtgataatcttcggcggatcctgaaagattacggcaatgaggctgtacatgtcctgtacggaacaggcgtagatggcggaaacatcaccaacagtaacgtcccgtaccgtctgatgaactcttgcggtggttttctcagtcgctatggcagctacagtaccgcacagatcagtgccgcaatgagttatatgttcggtgccaatgatggcaacagcccggatgatatcgccaatacgaaactggtcgttatgttcggaaataacccggcagaaacgcggatgagcggcggtggtgtcacttactacgtcgagcaagcccgcgaacgtagtaacgcacgcatgatcgtcatcgatccacgttataacgacactgctgccgggcgtgaagatgaatggctgcccattcgccctggcaccgatggcgcactggcctgtgcgattgcctgggtactgattactgaaaacatggtcgatcagccatttctcgacaaatattgtgttggttacgatgaaaaaacgctgcccgccaacgcaccacgtaacgcgcattataaagcctatattctgggcgaagggcctgacggcatagctaaaacgccggaatgggcagcaaaaatcaccagcatcccggcagaaaaaattatccagttggcacgagagatcggtagtgcaaaacctgcttatatttgtcagggttgggggccacaacgacattccaacggcgagcaaacatcccgcgctattgccatgctttccgttctcaccggcaacgtcggcataaacggcggcaacagtggcgtacgcgaaggtagctgggatctgggggtagaatggttcccgatgctcgagaatcctgttaaaacgcagatttccgtctttacatggacagatgccatcgaccatggtacggaaatgaccgcgacccgtgatggtgttcgtggaaaagaaaaactggatgtccccatcaagtttttatggtgctacgccagtaacacattgatcaatcaacatggcgacatcaatcacacccatgaggtgcttcaggatgacagcaagtgcgagatgattgttggcattgaccacttcatgacggccagcgctaagtattgcgatatcctgttgcccgacctgatgccaacagagcaagaagaccttatctctcatgaatctgcagggaatatgggctatgtgatcctcgcccaacccgcaaccagtgcaaaatttgaacgcaaacccatctactggatgctgagtgaagtcgccaaacgcttaggaccagacgtttatcaaacctttactgaaggtcgcagtcagcatgaatggatcaaatatctccatgcgaaaacgaaggaacgtaaccctgagatgcccgactacgaggagatgaaaacgaccgggatctttaagaaaaaatgcccggaagaacactacgtcgctttccgcgcattccgtgaagatccacaggcaaacccgttgaaaacacctagcgggaaaatcgaaatttattctgaacgactggcgaagattgcagatacctgggaattgaaaaaagatgaaattattcatccccttcctgcgtataccccaggttttgatggctgggacgatcccctgcggaaaacctatccactgcagttaacgggcttccattacaaagcgcgtacccactccagctacggcaatattgatgtgttacagcaggcctgcccacaagaggtgtggatcaaccccattgatgctcaggcacgcggtatccgtcatggcgataccgtgcgggtatttaacaataatggagaaatgctgattgccgcaaaagtgactccgcgtattctgcctggcgttaccgccatcgggcaaggtgcgtggcttaaagcggatatgtttggtgaccgggtcgatcacggcggcagtatcaatattctgacctctcaccgccctagtccgctggcaaagggaaacccgagccacagcaatcttgtccagatcgaaaaggtttaaggagtagcccatgaccacacaatatggattttttatcgattccagccgctgtactggctgtaaaacctgcgaactggcgtgcaaagattttaaagatcttggcccggaagtcagtttccgccgtatttatgaatacgctggcggcgactggcaggaagataatggcgtctggcaccagaacgtgttcgcttattatctctccatctcctgtaaccattgcgatgaccccgcatgtacaaaagtctgccccagcggcgcaatgcataagcgtgaagatggctttgtggtggttgatgaagatgtttgtatcggctgccgctactgccacatggcttgtccgtacggcgcgccacagtacaatgctgaaaaagggcacatgacgaagtgcgatggttgttatagccgcgtcgccgaggggaaacaacccatatgtgtcgaatcctgcccgctgcgtgcacttgagttcggtccaattgaagagctgcgccagaagcacggcactcttgctgccgtcgcgccactgccgcgcgcgcatttcacaaaacccaatatcgttatcaaacctaacgccaacagccgcccgaccggcgataccactggttatctggctaatccggaggaagtgtaaaatgggaaatggatggcatgagtggccactggttatctttaccgtattgggtcaatgcgtagtaggcgcgctgattgttagcggaattggctggttcgccgccaaaaatgacgcagaccgtcagcgtattgtccgtggcatgtttttcctctggctgttgatgggcgtcgggtttattgcctctgtcatgcacctgggaagcccactgcgggcgtttaactccctgaatcgaatcggagcttctggtctgagtaacgagattgctgccggttccatattttttgccgttggcggattatggtggctggtggcagtcatcggtaaaatgccgcaagcgttggggaaactctggttacttttcagcatggcgctcggcgtcattttcgtctggatgatgacctgcgtgtatcaaatcgacaccgtgccaacctggcataacggttacactacgctggctttcttcctgacggtattgttgagcggtccaatacttgctgccgcaattctgcgggcagctcgcgttacatttaataccacaccatttgccatcattagcgttctggcgctgatcgcttgtgccggggtgattgtgctgcaaggtttgtctctggcgtctattcacagttccgtgcaacaagccagcgcactggtaccagattacgcctccttacaggtctggcgtgtggtattgttatgcgcaggtcttggatgctggctttgcccgctcattcgtcgccgtgaacctcacgttgccggacttattctggggctaatcctcatacttggcggtgagatgatcgggcgtgtgctcttttatggcctgcacatgacagtaggaatggctattgcaggttaacaaattggtgcggggcaacccgcacatttcaggatgttaggaatgacccattttagtcagcaagataatttttctgtcgcggcgcgcgtgttgggcgcgctgttttattacgctccagagagtgcggaagccgcacctctggttgcggtactcaccagtgacggctgggaaactcagtggcctctaccagaagcgagtttagcgccgctggtgacggcttttcagacacagtgtgaagagactcacgcccaggcctggcagcgtttgtttgtcggcccgtgggcactgccgtctccgccgtgggggagcgtctggctggatcgcgaatctgtgctgtttggcgatagtacattggcacttcgtcagtggatgcgcgagaaaggcattcagtttgaaatgaagcaaaacgaaccggaagatcattttggtagtctgctgttgatggctgcgtggttggcggagaatggtcgccagacagaatgcgaagaattgctggcatggcacctttttccgtggagtacacgttttcttgatgtttttatcgaaaaagcagaacaccctttctaccgtgcactgggtgaactggctcgcttaacgctggcgcaatggcaaagtcaactgttaattcctgtcgcggttaaaccgctgtttcgataagatcaccgtaatattgccggatggtgacgattacgcgcaatccggcaataataggttacagtgtcacgtttttttatctcttaaagcacgcactgcttttgcggctggcctcttttgccgcaaaatagtcgcccgtgtttcattgcccatttctgctcatgcatcatctacacatctatccggatctgcgcactatgttccaccgtctgcttatcgcaacagtcgtcggtattctcgcggcctttgccgttgccgggtttcgtcatgcgatgctgctactggagtggttgttcctcaataatgactccggcagtctggtcaatgcagcgacaaacctttccccctggcgacggttgctaactccggcgctcggcggactggcggcgggtttgttgctgatgggctggcagaaatttacccaacaacgccctcatgcgccgaccgattatatggaagcgttgcaaaccgatggacagttcgattacgcagcaagcctggttaaaagccttgcctctctgctggtagtaaccagcggcagtgcaattggtcgcgaaggtgcgatgattcttttagctgcccttgccgcctcctgttttgcccaacgttttacgccacgccaggagtggaaattatggatcgcctgtggggccgcggcgggaatggctgcggcctatcgtgccccgcttgctggcagtttatttatagccgaagtgctgtttggcactatgatgttggcctctctcggcccggtgattatttccgccgtcgtggcattgctggttagcaatctgattaatcatagcgacgcgttactctacaacgtacaactcagtgtgacggttcaggctcgtgactatgcgctgattatcagtacaggtgtgctggcaggtctgtgcggaccactgttgttaacgttaatgaacgcctgtcatcgtggatttgtgagtctcaaacttgcgccgccctggcaactggcactaggcgggttgatcgtgggtctgctttccctgttcacacctgcagtgtggggcaacggctatagcaccgtacaatcctttttaaccgccccaccactgttaatgatcattgccgggatcttcctttgtaaactgtgtgccgtgctggcgagtagcggttccggcgcacccggtggggtctttacaccgacgctatttatcggtcttgccattggcatgttgtatggtcgtagcctgggattatggttccctgatggcgaagaaattacacttttactcggattgaccgggatggcgacactgttggcggcgaccacgcacgcgccgattatgagcacgttgatgatatgtgaaatgaccggggagtatcagctactccccggtttattgattgcctgcgtaattgcgagcgtaattagccggacgttacaccgtgactctatctaccgccagcacactgcgcagcatagctaagcggatgtattgccccagttcacgctgttcggcgcgcggcagataaggcagttcaccaatgagcggtgccggaagttttttacccagcacatcaatgatttccgcataatgcgccagtcctgggttgattcggttagccacccagccaatgagcggcagcccgtcgttggcgatcgcctgagctgttagcagtgcatggttaatgcaaccttcctgaataccgacaaccatcaacaccggcagttgttcctgcactacccattcagagagtggacgcaaatcattcatcagactgcgccagccgccagtcccttctaccacgacatgatcgactttttcggtcaggtttgccaggccgttactaatgagggtgtaattgattgggcaactgtgcgccacgctactttcttcttcgcttaacgcgataggattaactgcttcataaggcagttcgatggtactaacactctgcaacaccagggcatctttattacgcagcccttcgggtgtctctttgctccccttcgctacgggtttatatcccgcaaccgtttttccctgggaggctaacgcttgtagcaatgcgcgggaaaccaccgttttccctacagaagtgtctgtaccggtaataaagaaacgcttcagcatcactaactccaccgttatgcttcacaaatataaaccaggaaaataattaaccttgaaagtctaagttatgctttcctggcccaaattgagatagcgcaaattttggtagaacagttaaaaaatgttaaccctgcaacagacgaatcaacaaagaaccgttatacatcgcgtcttttaccagtgcagcgcctgccatcgtgccctggttagaaaactgagtactctcaacgctgatgtgctgactatacgcaggaagggcctgctgacggatgctgtcactgatgaccgggaagaggatatctgccgctttacttaacggactgccaatcagtattttttgtgggttaaataaattcaccatgatggcaagaatgcgcccgacatgcgcgcccaccccggtaatgatgtcttttgccagtagatcgccgcgcaatgccgcctgacacaaactgtccacggttaacggttgtccatgtaacatgctgctcatggattgattaagacgcagctgtgccagctcaagaatactgtccacgctggcgatggtttcgaggcagccgtgattcccgcaataacagcgtttcccatacgggtcgacctgtgtgtggcctatttccacgagactactgctgcctgcgtgtagcagatgaccatcggtaatgacgcccgcccccacgttgtgatcgataaccacctgaatcacatcgcgcgccccgcgactggcaccaaacaaggcctctgccatcgtccatgcgctgatatcatgctgaatataaaccggaacgccggtatgctgctccagcgcctcgccgagcggcatctcttttacatcctcgtagaacggcatgcgatgtacaataccattttccgtatcaataattcccggcaaggttatggcaatgctagttagacgctcaagttttttctggtggcggataaaaaactgatcgatatgggaaataatacgatccagcaatggcaagtcatcttttaacgccagttcctggctctcttccaccaccagtttgctgctcagatcgcgcagagcaaggaaaatctccccgcgactaatgcgcagagaaagatagtgccaggcttcagtttcaaccaccagccccaccgccggacggccacggttccccgcttctttgatttccagctcttgcaccaggtgtgcttcgagcatctcacggacaattttagtgatactggcaggagccagttgcgccagacgggaaagatcgatacggctgactggaccaagctgatcaatcaggcgataaaccgcgcccgcgttggtctgctttatttgatcaatgtgcccaggctggttttcagcaaccaccgcatactccctatattttcgcgctccgaaataatctgtaggctatggtgaagcacttcaatacgtgtcgtcaaatttttacttaggcatgtgattaacagcacatttttcgggctttttcgctgaaatttccctcacctgagagcattcagcagatgaatacgaaagttacgcgcagccggactttgttcatgatgtttcggccagaccaaccacatttcagaaaccgcatcctcttcagcaatcggcacccagcgcatttcgttgagctgaacacgtttaaaactcgcaggcaaaatactaacacccagaccggcggaaaccagaccgatgatggtcattgcctcgcccacctcctgagtgatgacgggcgtcaaatggtaacgtcgcatcagcccgagaatatcgtcatacagccctgtcccgacgtgcggatcaaaaaagacaaagggttctttcgccagttcagccagcgttacattcgggttatttgccaggggatgatcgtgcgggatcatcgccataagcggttcatggacgatgactgcgtgttcaaggctctccggtaacgctgtgttacgcagcaatcccatatccagcgttccttcaatgagcggagcgatttgctcgcgagtgttcatttcgcgggtttgtaaatggacatcaggataatcacggcgaaacaggcttaacgtatcggacaccgcccgaataaaaggagcgctgctagtaaaaccaatgcgcaactcccccgcttcaccctgatgcagcctttcagcgcgagcggcagcgtcatccaccatagacaggatttgccgactatctgcaagaaactgttttcctgctgccgtcagcaatacactgcgattggttcgtgccagcagtcgggcaccaatttgttgctccagcgcctgaatctgctgacttagcggcggttggctaatattcaggcgggcagcggcgcgcccgaaatgcagctcttccgcaacagcaacaaagtaacgcagatgacgaagttcaatattcatatttaaaacatcttatttgagattattaatatattagacagaacaattcgattttcctaccctatgtataagcctgatctacaggcatatttagcaaggatttcaagtgagccgtactacaactgttgatggcgctccggcaagcgacactgacaagcaaagcatttctcagccaaatcaatttattaaacgcggtacgccgcaatttatgcgcgtcaccctggcgctgttctctgccggactggcaacatttgcacttctctattgtgtgcagcctatccttccggtgcttagccaggagtttggcttaacccccgcgaacagtagtattagtctgtccatttccacggcgatgttggctattggtttgctgtttactggcccgctatccgatgccattggtcgcaaaccagtgatggtcacggcgctactgttggcctccatttgtacgttacttagcacaatgatgaccagctggcacggcattttgattatgcgcgccttgattgggcttagcttaagtggcgtggcagctgttggcatgacttatcttagcgaggaaatccatcccagtttcgtggcctttagtatggggttgtatatcagcggcaacagtattggcggcatgagcggacgcttaattagcggtgtcttcacggactttttcaactggcgaattgctctggcggcaatcggttgtttcgcgctggccagcgcgttgatgttctggaaaatcctccctgaaagtcgccattttcgcccgactagcctgcgccctaagacgttgtttatcaactttcgtctgcactggcgtgaccggggattaccgttattgttcgcagaaggctttttgctgatggggagcttcgtcacgctgtttaattacatcggctatcggttgatgctctccccctggcatgtcagtcaggccgtggttggcttattaagcctggcttatttgaccggtacatggagcagtcccaaagccggaaccatgaccacccgctatgggcgtggtccagtgatgttgtttagcacgggggttatgctgtttggtttactgatgaccttattcagcagcctgtggctgatctttgccggaatgttactcttcagtgcaggattcttcgcagcccacagtgtagccagcagctggatcggcccccgcgcaaaacgcgctaaaggccaggcctccagcctgtatctgttcagttactatctggggagcagtattgccgggacgctgggtggtgttttctggcataactatggctggaacggcgtcggcgcatttattgctctgatgctggtcattgctctgctggtcgggacgcgtttgcatcgtcgtctgcacgcctgaaaaataagtccggactgcggtaaatacccgtccggacttattgccagctcaaaccaacgttaatagccatcctaaaatagacgaagcgccagccaattcccgcagcgcgtctagcgtcatcaggattataagtacccaaataaacggattcattttgctgtgtgtcatttattactgatgcgcagttattctactgctttgtaagtagtaaaatagttaacccgatcaagactactattattggtagctaaatttcccttaagtcacaatacgttattatcaacgctgtaatttattcagcgtttgtacatatcgttacacgctgaaaccaaccactcacggaagtctgccattcccagggatatagttatttcaacggccccgcagtggggttaaatgaaaaaacaaattgagggtatgacaatgaaaaaagtattagctctggttgttgccgctgctatgggtctgtcttctgccgcctttgctgcagagactacgaccacacctgctccgactgcgacgaccaccaaagcagcgccggcgaaaactacacatcataaaaaacagcataaagcagcacctgcccagaaagcgcaggcggctaaaaagcatcataaaaatacgaaagctgaacagaaagcccctgaacaaaaagcgcaggcagcgaagaaacacgccaagaaacacagccatcagcaaccggcaaaacctgctgcacaacccgcagcgtaagttttcaacagtaatgctggcgcgccccctcgcgcctgaaaattacggtgctaagcgggtaacgtttagcaccgcctttagcggagggtagtatggtgggccgttatcgctttgagttcattctgatcatccttattttatgcgcactgattaccgcccgtttttatctttcctgattgtagttatctgattttactcccactttcatcccgtcccgtctatagtatttatgagggtttgcttttaataatcataattacccaccagagtgtgatatgcgtacaaccattgctgtagtgttgggtgcaattagtttgacgtctgcttttgtgtttgcagataaaccagacgttgccagaagcgcaaacgatgaggtcagcaccctgttttttggtcatgatgatcgtgtgccagtgaatgacacgacccaaagtccgtgggatgcggttgggcaactggaaacggccagcggcaatttatgtacggcgacgctgattgcacccaatctggcattaacggcaggacactgtttattgacacctccaaagggtaaagccgataaagcagtggcgctgcgttttgtgagtaataaaggtctttggcgctatgagatccacgacatagaaggccgcgttgatccgacactgggaaagcggttaaaagcagatggggatggttggattgtacctcccgcagccgcgccgtgggacttcggattgattgtgctacgtaatcccccttctggcattacgccgttgccgttatttgagggagataaagccgcgcttaccgccgcattaaaagcggcaggtcgtaaagtgactcaggcaggctaccctgaagatcatctcgatacgttgtacagtcatcaaaactgtgaagtgactggctgggcgcaaacgagcgtgatgagtcatcagtgcgataccttgccgggtgacagcggtagccctctgatgttgcataccgatgacggctggcaattaattggggtgcaaagtagcgctcctgccgcgaaagatcgctggcgcgccgataaccgggccatttctgttaccggttttcgcgacaagctggatcaactgagccaaaaataatgttcaaacgctgcccgacagcgcgggcagcgtcttcatcaggcaagtttcaccatgatcattccagccaacagcaagaccaggccaatccagcctttacgatttaaccgttgaccaaacaagatccaacctgcggctaacgtggcggcaataccaaacccgccccacaatgcataagcgacagacaagtcgatccctttaacggcttgagaaagcgcactaaaggcagccagcaccgccgccagggagagcaagccaaatattttgcgacgaaagccgtcagaaaatttcaaaaagacgttagcaacgatttccagcacgattgccaatgccagccaggcggcgtgaacccattcaaactgcgccatggttcacctccagttcaggtttacgcgctttacgggtaccactttttatcaacacaatcccggcgaccagggtggttaacccggcaattttcatcaggcttaaactttcgtcgaataacaaaacgctaaacaaggtaataaataaaataccgataccttcccacagcgcataagctacgcctaaggcgatttttttaacggcgaaagagagaaatatatagctcagagaaatcatcaccagcattaaaataaagccgccatttccctcactgacgctcgcccatttcatactcagcgtaccggtaatttctgtagcaatagccagacctaataaaatccaataaatatacattgtccttctcctgcaagagaattattttaattttcgcttaattcagcgaaaccaaagtaaagtggtcaagccccgcgcatagcgcaagctttggcagaagaaaggactaaagcgcgttgcgccagtgctgctcacctacgagcaagatagtggatgaggtacgaagatgggtaaatgtagaaaataacgtcctgaacaaattgtccataatattacaattatccgcagtgttgcttctcgtcatcgcggatgataattgtcctcggtagttgaacacgcctgatttgtatcatagcttaagaattaactcaaaatattttcacttctttacctgagcggtttgattttcgttatgatgacggagcgaaaaagacattattattagcaaaggaagaaaaaacggggacaagcatggcaaagccgatcatcacgctcaatggcctaaaaatcgtcattatgttgggaatgctggtcattattctctgcggtatccgttttgccgccgagatcatcgtgccgtttattctcgcattatttattgctgttattcttaacccgctggtgcaacacatggtccgctggcgtgtgccgcgtgtactggcggtgagcattttgatgaccatcatcgtgatggcgatggtgttgctattagcttatctgggttccgcgctcaacgagttgacgcggacgttaccgcaatatcgcaactctattatgacgccgctgcaagcgcttgaaccgttgttgcaacgcgtagggattgacgtcagtgttgaccagctggcgcattatattgatccgaacgcggcgatgacgttgctcaccaacttattgacgcagttatctaatgccatgagtagtatatttttattgctgctgacggtgctgtttatgctgctcgaagtgccacaattgcccggaaaatttcagcaaatgatggcgcgtccggttgaagggatggcggcgattcaacgtgcgattgacagtgtttctcattatctggtgctgaaaacagccatcagcatcatcaccggcctggtcgcctgggcgatgctcgccgcactcgatgttcgcttcgcttttgtctggggattgctggcctttgcgcttaattacatcccgaatattggtagtgtcctcgcggcaatcccccctatcgctcaggtactggtgtttaatggcttctacgaagcgttgctggtgctggcgggatatctgctgattaatctggtcttcggcaatattctggagccgcgtatcatggggcgtgggctggggctttccacattggtggtatttttgagcttgattttttggggatggttgttaggaccggtgggtatgctgctttccgtgccgttgacaattattgtcaaaattgcgcttgaacaaacagcgggaggtcaaagcatcgccgttctgttaagcgatctcaataaagagtgacggcctcagcagaggccgtcagggttacagagctttcaggattgcatccacgctggctttggcgtcaccaaacagcatgtgggtgttttccttgaagaacagcgggttttgcacaccagcatagccagtgttcatgctacgtttaaagacaatcacgttctgcgctttccacacttccagcacaggcataccagcaatcggactcttcggatcatcctgcgccgccgggttaaccgtatcgttagcaccaatcaccagtacggtatcggtatcagcaaagtcatcattgatctcgtccatttccagcacgatgtcatacggtacttttgcttcagccagcaatacgttcatatgtccaggcaaacgccccgcgaccgggtggataccgaaacgcacattaataccacgagcgcgcaatttctcagtaatttcagcgacaggatattgcgcctgcgcgactgccatgccgtaccccggagtaatgatcacactatgggagtttttcagcagttccgctgtctcttctgcggtgatttcgcggtgctcacccacttcctgatcatcgccagtagaagagccgtcggtgccgaaaccacccgcaataacgctgataaaggaacggttcatcgccttacacataatgtaagaaaggatagccccgctagaaccgaccagcgcaccggtcacaatcagcaggtcgttgctgagcataaagcccgcagccgcagccgcccagccggagtagctgttcagcatgctcaccaccactggcatatctgcaccaccgatggaggcgactaaatgccagccgaataccagcgcaattgcggtcattatcagcaatgccagcacttgcaggccgacgctgtccgtgcgaacaaatacaatcagcagcaggaaggaaacgaccagagccgccaggttcattttgtgacggtttggcagcatcaatggtttagagctaatcttgccacacagtttgccgaacgccaccacgctacccgtgaacgttaccgccccgatgaagataccgaggaacacttccgtcaggtgaatattgaccagaatcggtgccattcccgcgtcatgatgcagatagctgttaaagccaaccagcactgccgccagacccacgaagctatgcaggatcgccaccagttctggcatttcggtcatttcaactttcttcgccagacggataccaattgccccaccaatgaccatcgccagcaagatccagccaacattacccgtatccggtccaaaaatggttgcgattaacgcaatcgccatcccggcgataccgaagttgttaccctggcgagacgtttcatgtttgctaagaccggccagactgaagataaacaggatcgcggcaacaatgtatgcagctgtaactaatcctccagacatatgttaccccttaatttttgcggaacattttcagcatgcgctgagtcacggtgaagccaccgaaaatattaatgctggctataagcaccgcgataaaactaaggaagctaacccagccgccctggccaatctgcaacagtgctccgacaacaataatcccactaatcgcgttggtgacgctcatcaacggtgtatgcagcgcgtggcttacattccacaccacgtaataaccgacaacgcaggccagcgcgaaaacggtgaagtgcccaaggaattctttcggcgcaacgcttgccatccagccaaaaagaatgattgccagcgccatcaacgcgtatttacgccacggactgcaggtacatttttcctcagttttcacttccggtgccgctttttgtgccgcctgcggctgagcacttacctgaatcggcggtgccggccaggtaatttcgcccgcacggatcacggtcacgccgcgaatcaccacatcatcaaaatcaacagtgatattgccgtctttctctttgcacaacagtttcagcagattaacgaggtttgtgccgtaaagctgactggattgcgtcggcagacggcccggaagatcggtataaccaatcactttgacaccattttccgtagtgaagatttcacccggcacggtgtattcacagttgccgccgttttgggctgccaggtcgacaatcacactgcccgccttcatggagtcaaccatttcacgggtaattagcttcggcgctggtttgcctggaataagcgcggtggtgacaatgatatcgacctcttttgcctgggcggcaaagagttccatttccgctttgatgaacgcgtcgctcatcactttggcatagccatcgccgctgccagcttcctctttaaaatccagctcgaggaattccgcgcccatactttgaacttgttctttcacttccgggcgggtgtcgaatgcacgcacaatcgcgccgagactgtttgctgcgccaatggcggccagacctgcaacacccgcaccaatcaccatcacttttgccggtggcactttcccggccgcagtaatttgcccggtaaagaagcgcccaaattcatgtgccgcttcaacaatggcgcgataaccggcgatgttcgccatgctgcttagtgcgtccaggctttgtgcgcgactgatacgcggcacagagtccatcgccatcacggtcacgttacgttccgcaagtttttgcattaattccggattctgcgcaggccagataaaactcaccagcgttgtcccaggattcagtaacgcaatttcatcatctaacggcgcattgaccttcagaatgatctcactctgccagacgctattcccttctacaatttcagcgcccgcttgcacaaacgctttatcgtcaaaacttgccagttgacccgcgccgctctctaccgcgacggtaaaacccagtttcagcagctgttccactgtttttggcgttgctgcaacacgggtttcattggttaaccgttctcttggtatgccaattcgcatgatattcccttccatcggttttattgatgatggtttgcctgtgtcaggagccacacaagctgctcatgtacgagctaaatgttactccgttaaaataaattagtaacaaacgccctataacgtactgaaaattatgcctgtgatctagcgccaaaaatcagtatttcggcgtgaactcgcaaaatattaacgattcagccgtgatagtgggataaacaccttagaacgccggataaagactgataattgtcttcgacggtcgggtaaaacgagacatcgccccggcacgaatcactacttaacattaaattaacttatacaattcagttgcttcagtagtaatgatgctgatacggctgttttttaagcatagacggtcatttgagcaggattaaaattggcttaaggaatgtgatatgaaaaatgacgcagacagttacaccgtttaaatgcaataatcagccacgtttctcgttaataacaataccagtacctggtttgcgcaaggcgaaggattatttttatgaagcttaagaacaccctcctggcgagcgcactgctttctgctatggcattctccgttaacgcagcaacagaactgacaccggagcaagcggcagcggttaaaccttttgaccgtgtagtggttaccggtcgttttaatgctattggcgaagcggtgaaagccgtttctcgtcgcgcagataaagaaggtgccgcctctttttatgttgtcgacacttctgattttggtaacagcggtaactggcgtgtggtcgctgacctctataaagccgatgctgaaaaagcagaagaaacaagtaatcgcgtaattaacggtgttgtcgaactgccgaaagatcaggctgttctgattgaaccgtttgacacggtcaccgtccagggcttctatcgtagccagccagaagtcaatgatgccatcaccaaagcggcaaaagcgaaaggtgcctactctttctacatcgttcgtcaaatcgatgccaaccagggcggcaaccagcgtattactgcattcatctataaaaaagatgctaagaaacgtatcgtccagagcccggatgtgatcccggcagattccgaagcaggacgtgcagctctggctgccggtggcgaagccgcgaagaaagttgagatcccgggtgttgcgactaccgcaagtccaagttctgaagtcggtcgcttctttgaaacccagagtagtaaaggcgggcgttacaccgtcacgctcccggatggcactaaagtcgaagaactgaacaaagcgaccgcagcgatgatggtcccgttcgacagcatcaaattctctggcaactacggcaacatgaccgaagtctcctatcaggttgcgaaacgtgccgcgaagaaaggtgctaagtattaccacatcacccgccagtggcaggaacgtggtaataacctgaccgtcagcgcagatctgtataaataactattcagttactcctataaggcggcttgatgccgcctttcgcatttttagtcacaaatttccccgcgaccattgcatgcagacacatctcttcgtaaaatcccgcgcttcagtggcaaactccatttttatgcgttttgccctaatatttattcttcttatcacgttttaatcactggatatcgatggaaaagaaactgggactgagcgcactcaccgcgctggtattaagcagtatgctgggcgcgggtgttttcagtctgccgcaaaatatggcggcagttgccagcccggcagcactgctcatcggctggggtattactggcgctggcattttattgctggcctttgccatgctgatcctcacgcgcattcgtcccgaacttgacggcggtatctttacctatgcccgcgaagggtttggcgagctaatcggcttttgttccgcatggggatactggctgtgcgcagtcatcgccaacgtctcctatctggtgatcgttttttccgcgttaagcttttttacggacacgccggaattgcgcctgtttggcgatggtaatacctggcaaagcatagtcggtgcaagcgctttattgtggattgttcactttttgatcctgcgcggggtgcaaaccgctgccagcattaacctggtggcgacactggcaaaattgttgccgctgggtctgtttgttgtgctggcgatgatgatgttcaaactggataccttcaagctcgacttcaccggacttgcacttggcgtacccgtttgggaacaggtgaaaaacaccatgctgatcaccctgtgggttttcattggtgtggaaggtgccgtggttgtttctgcgcgtgcgcgtaataaacgtgatgttggcaaagcgacactgctggcggttctctccgctctgggcgtttacttgctggtaacgctgcttagcctgggtgtggtggcacgtcctgaactggctgaaattcgtaacccgagtatggccggtctgatggtggaaatgatgggaccatggggcgaaatcatcatcgctgccggtttgatcgtttccgtttgcggcgcgtacttaagctggaccatcatggcagcagaagtaccgttcctggccgccactcataaagcattcccgcgcatttttgcgcgccagaacgcacaagctgcgccatccgccagtctgtggttgaccaacatctgcgtgcaaatttgtctggtactcatctggctgaccggttccgattacaacacgttgctgaccatcgccagtgaaatgattctggtgccctatttcctggtcggcgcgttcttgctgaaaatcgcaacccgtccactgcataaagcggtaggtgtcggtgcctgcatttatggcttatggttattgtacgcctctggtccaatgcacttgctgttatccgttgttctgtatgcaccggggctgctggttttcctgtacgcgcgcaaaacgcatacccatgataatgtactgaaccgtcaggaaatggtgctgattggcatgctgttaattgccagtgttccggcgacctggatgctggtgggataacgttcatcccatcgttggatagcaaaggagataacgatgggtaaaacccagcccttgccaatattaattactggcggaggtcgtcgcatcggcctcgccctcgcatggcatttcattaatcaaaagcaaccggtgattgtcagctatcggacacactatccagccattgatggactgattaatgcaggtgcgcagtgtattcaggctgattttagcaccaacgacggtgtgatggcgtttgccgatgaagtactaaaaagcacccatggtctgcgtgctattttgcataacgccagtgcgtggatggcggaaaaaccgggtgcgccactggccgacgtactggcttgcatgatgcagatccacgttaataccccatacctgctcaaccatgcgctggaaagattactgcgtgggcacggacacgccgccagcgatatcattcactttaccgattatgtggtggagcgcggtagcgacaaacatattgcgtatgctgcaagcaaagcggcactggataatatgacccgcagctttgcccgcaagctggcaccggaagtgaaagtgaattctattgcgccaagcctgatcctgtttaatgaacatgatgatgccgaatatcgacaacaggcgctgaataaaagtctgatgaaaaccgcgcctggcgagaaagaagtgatcgacctggtcgattacttacttaccagttgctttgtcaccggacgcagtttcccacttgatggcggtcgtcatctgcgttaatgcagctttatccagcatataatcaacacccatgcgcttatcccccaacacgcaacagaaccaacaaaagcggcgggcaagcgcatcattccggtgaaataccacaggctcaccaggtaaacaaaatagggaataatgctccacatactaaaaatgatggttgcgcgtaaggcttcaatgccgcgttcgctggcaacaatataatgcgcgataagcgcaaaggtcgggaaaagtggaatcagcccggcgatataataatttttcgtttttgctaaaacaccaatcaacagcactaccagcgcaccgagcgcggctttgattaccagccccatctttttaccttaacacttccataacaagtcatcagtagaatacctgatgaaaacttgtttagaaacgattgatagtaagtaaaaacagcgcggtgtattgtgacgtttttatatctaccgtgaatgttatgaacactatcgtatttgtggaagatgatgcggaagtcggtagtctgattgccgcgtacctggcaaaacatgatatgcaggttaccgtagagccgcgcggcgaccaggccgaagaaaccattttgcgagaaaatccggatttggtgttactcgacatcatgctaccaggcaaggacggcatgaccatttgtcgtgatttacgcgcaaagtggtctggaccgattgttcttctaacctctctcgatagcgatatgaaccacatcctggcactggaaatgggtgcctgcgactatattctcaaaacgacgccccctgctgttttgctagcgcgtttacgtttgcatttgcgtcagaatgagcaagccacactgaccaaaggtcttcaggaaacgtctctgactccctacaaagccctgcatttcggcacgttgaccatcgatcccatcaaccgcgtagtcaccctggctaacactgaaatcagcctcagcacagctgatttcgaattattgtgggaattagctacccatgccgggcaaatcatggaccgcgatgcattgctgaaaaatttacgcggcgtcagttatgacggactggatcgtagcgtggacgtggctattagccggttaagaaaaaaactgctcgataacgccgcagaaccttatcgcattaaaactgtgcgtaacaaaggctatctttttgcgcctcatgcatgggaataagcgatgaaaaaactgtttatccagttttacctgttattgtttgtctgcttccttgtgatgtctctgctggttgggctggtgtacaaatttaccgccgaacgcgcgggcaaacagagcctggatgatttgatgaacagtagcctgtatctgatgcgcagcgaattgcgtgagatccccccacacgactggggtaaaactctgaaagagatggatttaaatctctctttcgatctgcgtgtcgagccactgagtaaataccatcttgatgatatttccatgcaccgactgcgtggcggcgaaattgtcgccctggacgatcagtacacgtttttgcagcgtatcccgcgcagccactacgtgctggcagttggtcctgttccttatctttattatctccatcagatgcgattgctggatatcgccctgatcgcttttattgctatttccctcgcctttccggtgtttatctggatgcgtccgcactggcaggatatgttaaaactggaagcagcggcgcaacgatttggcgatgggcatctcaatgaacgtatccactttgatgagggtagcagctttgaacgacttggcgtcgcatttaaccagatggcggacaatatcaacgccttaattgccagcaaaaaacagcttattgacggtatcgctcacgaactgcgaacaccgttagtgcgcctgcgttatcgactggagatgagcgataacctgagcgccgccgaatcccaggcgttgaatcgtgatatcagtcaacttgaagctttaattgaagagctgctgacttatgcccgactcgatcgcccacaaaacgagcttcatcttagcgaaccagacctgccgttgtggctgagtacgcatctggcagatattcaggcagtaacgcccgataaaacggtacggataaaaacgctcgtgcaaggccattatgcggcgttggatatgcgcttaatggagcgcgtgctggataatttgctcaataacgccctgcggtactgccatagtacggttgaaaccagcctgctactgagcgggaatagagcgacattaattgttgaggatgatggcccagggattgccccagaaaaccgcgaacatatctttgaaccttttgttcgcctcgatcccagccgggatcgcagtaccggcggctgcgggctggggctggcaattgtccactctatagcactggcaatgggcggtacggttaattgtgacaccagcgaactgggtggtgcccgcttcagctttagctggccgttatggcataacatcccgcaatttacctctgcctgacactacgcgcacgatggtcaagtcaccacgactgtgctataaaataagtatgttgtaactaaagtggttaatattatggcgcgttacgatctcgtagaccgactcaacactacctttcgccagatggaacaagagctggctatatttgccgctcatcttgagcaacacaagctattggttgcccgcgtgttctctttgccggaggtaaaaaaagaggatgagcataatccgcttaatcgtattgaggtaaaacaacatctcggcaacgacgcgcagagcctggcgttgcgtcatttccgccatttatttattcaacaacagtccgaaaatcgcagcagcaaggccgctgtccgtctgcctggcgtgttgtgttaccaggtcgataaccttagccaagcagcgttggtcagtcatattcagcacatcaataaactcaagaccacgttcgagcatatcgtcacggttgaaagtgaactccccaccgcggcacgttttgaatgggtgcatcgtcatttgccggggctgatcacccttaatgcttaccgcacgctcaccgttctgcacgaccccgccactttacgctttggttgggctaataaacatatcattaagaatttacatcgtgatgaagtcctggcacagctggaaaaaagcctgaaaagtccacgcagtgtcgcaccgtggacgcgcgaggagtggcaaagaaaactggagcgagagtatcaggatatcgctgccctgccacagaacgcgaagttaaaaatcaaacgtccggtgaaggtgcagccgattgcccgcgtctggtacaaaggagatcaaaaacaagtccaacacgcctgccctacaccactgattgcactgattaatcgggataatggcgcgggcgtgccggacgttggtgagttgttaaattacgatgccgacaatgtgcagcaccgttataaacctcaggcgcagccgcttcgtttgatcattccacggctgcacctgtatgttgcagattaacgcccggctttcatactgccgaccatctgttctggccgtacccagctgtcaaactcggcttcgctaagataccccagcgcaagggccgcagcttttaaggtcagcccttctttatgcgcttttttggcgatctcggcggctttgtcataaccaatgtgggtgttaagcgcagtcaccagcatcaggctttcattgagtaattgattgattcgctcacgattcggttcaatacccactgcgcagtgtttgttaaaactttccatgccatctgccagcaagcgcacgctttgcaggaaattgtggatcaccattggacggaagacgttcagttcaaagttaccggaagcgccccccatgttgatcgccacgtcgttccccatcacctgacagcagagcatggttaatgcctcacactgtgttgggttcactttccccggcatgatactgctgcccggctcattttccgggatactgatttcaccaattccgcagcgcgggccagaggccagccagcggacatcattggcgattttcatcagactcgcagccaaccctttcaacgcgccgtgcgcctgaaccagggcatcacaggtcgccagcgcttcaaatttgttcggcgcggtaacaaacggtgcacaggtaatgactgccagttcatctgctacgcgacgcgcatactccggatgggtatttagtccagtacccaccgctgtaccgccaagagccagttccgctacgtgaggcaggctgtattcgatatgtttgagattatgctcgagcatcgctacccagccggaaatctcctgccccagcgttaacggcgtggcatcctgcaagtgagtacgaccaattttgacgatatcggcaaaagcacgggatttctcattcagtgtctgtgtcagggttttaagctgaggaatgagttgcttgcgcagcgccagcagcgccgcaacgtgcatcgccgtcggaaagacatcgttggaactttggcttttgttcacgtcgtcgttagggtgaactttacgttccatcccgcgcacaccgccgagtaattcactggcccggttagccagcacttcgttcatgttcatgttactttgcgtgccggagccggtctgccagatagccagcgggaattcgtcgtcatgctgtcctgccagtacttcatccgccgcctgacgaatggcgctcgctttctcttcagacaacaagcctaaatcttcattaacttttgccgctgcacgcttggttagcgccagcgcatgaatcagactggtgggcattttctccgtgctaatgcggaaatgctccaggctgcgttgagtttgtgcgccccacagcttatctgccgggacatcaatcgcccccatgctatctttttcgctgcgtactgtattcatgacctgctcctcacctgattaattttttctttctgttttgctttcgttaagcaacttttagctcacttattatttaccatttgataacaaatgtttggtctttcgtgccatgtaaaaaaaccgccccgaagggcggctctgtttatttcacacagcgggtgcattgtgtgagttgtatctgctggaagaagtcatttcctttatcatccacaaggataaacgccgggaaatcttccacttcaattttccagatggcttccattcccagttccggatattcaacacattccaggctcttaatacttccctgcgccaatacagcggccggaccaccgatactgccaaggtagaagccgccgtgttttttacaggcatccgtcacctgctggctgcggttgcctttcgccagcatgatcatacttccgccctgcgcttgcagttgatcgacataagaatccatccgtccggcggtcgttgggccaagagaaccggaggcataaccttccggcgttttggccggacccgcgtagtaaatcggatgatctttgatgtactgcggcagcccttcaccgttatccatccgctctttcagtttggcgtgagcaatatcacgaccgacgataatcgtgccgttaaggcttaagcgtgtagaaacgggatactggctcaactgtgcgaggatctctttcatcggacggttaaggtcaacgcgcaccgcttcgccttctcccgctttgcgcagctcttccgggatatatttgcctggattatgttccagtttttcgatccagatcccctgacggttgatcttcgctttgatattacggtcagcagagcaggagacgcccataccgaccgggcaggatgcgccgtgacgtggcaggcgaatcacgcggatgtcgtgagcgaagtatttaccaccaaactgcgcacccagaccaagattttgcgcttcgatcagcaattctttttccagttccacatcgcggaacgcctgaccgtgctcattcccttccgttggcagttcatcatagtatttcgcggaagccagtttcaccgttttaaggttcgtttctgcagaagttccaccaataacgaacgcaatatgatacggaggacaggccgccgtacccagcgtgcgcatcttctcaaccaggtaatttttcagtttccccggcgtcagtaacgctttggtttcctgatagagatacgtcttgtttgcgctaccaccacctttggcgatacagaggaatttgtattcgtcgccatcaacggcataaagatcgatctgcgctggcagattggtgccggtattcacttctttatacatatccagcggcgcgttttggctgtagcgcagattatcttcgatataagtgttatagacaccgcgcgccagcgccgcttcatcaccaccaccggtccatacacgctgcccttttttaccaacaataatcgcggtgccggtatcctgacaggttggcagaacgcctttcgccgcgatgtcggagttacgcaggaattgcagcgccacatatttatcattttcgctggcctccgggtcacgcagaatgtcggccacctgttgttggtgcgccggacgcagcatgaagctcgcatcatgaaacgcctggcgcgccaacagagttaacgcttcgggtgcgactttcaaaatctcctgcccttcaaattcagatacgctaacgtgttcgctggttagcaggtaatactcagtatcatcttttttgagtggaaaaggagcctgataatgaaagggtttgttactcattgttctctcacttactgcctggtttggttatgctctgggcgggtgttccgttgccctgttaaaagcgagtaacaatatcctacacacttttttaacaaaaactgagactagtacgactttttgcggctccaggttacttcccgtaggattcttgctttaatagtgggattaatttccacattaaaacagggattgatcatgcaaaaactcattaacagtgtgcaaaactatgcctggggcagcaaaacggcgttgactgaactttatggtatggaaaatccgtccagccagccgatggccgagctgtggatgggcgcacatccgaaaagcagtagtcgagtgcagaatgccgccggagatatcgttagtctgcgtgatgtgattgagagtgataaaagcactctgctcggagaggccgttgccaaacgctttggcgaactgcctttcctgttcaaagtattatgcgcagcacagccactctccattcaggttcatccaaacaaacacaattctgaaatcggttttgccaaagaaaatgccgcaggtatcccgatggatgccgccgagcgtaactataaagatcctaaccacaagccggagctggtttttgcgctgacgcctttccttgcgatgaacgcgtttcgtgaattttccgagattgtctccctactccagccggtcgcaggtgcacatccggcgattgctcactttttacaacagcctgatgccgaacgtttaagcgaactgttcgccagcctgttgaatatgcagggtgaagaaaaatcccgcgcgctggcgattttaaaaagcgccctcgatagccagcagggtgaaccgtggcaaacgattcgtttaatttctgaattttacccggaagacagcggtctgttctccccgctattgctgaatgtggtgaaattgaaccctggcgaagcgatgttcctgttcgctgaaacaccgcacgcttacctgcaaggcgtggcgctggaagtgatggcaaactccgataacgtgctgcgtgcgggtctgacgcctaaatacattgatattccggaactggttgccaatgtgaaattcgaagccaaaccggctaaccagttgttgacccagccggtgaaacaaggtgcagaactggacttcccgattccagtggatgattttgccttcagcctgcatgaccttagtgataaagaaaccaccattagccagcagagtgccgccattttgttctgcgtcgaaggcgatgcaacgttgtggaaaggttctcagcagttacagcttaaaccgggtgaaagtgcgtttattgccgccaacgaaagtccggtgactgtcaaaggccacggccgtttagcgcgtgtttacaacaagctgtaagagcttactgaaaaaattaacatctcttgctaagcttattaaaggcttataacaccttcaggcggccagtccgcctgatttcattttatggataatcattatgaataaaagcctggtagcggtaggcgtcattgttgcgctaggcgtagtctggacaggcggcgcatggtatacaggcaagaagattgaaacccatctcgaagacatggtcgcgcaggcgaacgcgcaactcaaactgacagctcctgaatccaacctggaagtgagttatcaaaactatcatcgcggcgtattcagcagccagttgcaactgttggtgaaacccattgccgggaaagaaaatccgtggattaaaagcggtcagagcgtcatcttcaacgaaagcgttgatcatggtcccttcccgcttgcccagcttaaaaaactgaacctgatcccgagcatggcaagtattcaaaccacgctggttaataacgaagtaagcaaaccactgtttgatatggcaaaaggtgaaacgccttttgagattaacagccgcattggttacagcggtgattccagttccgatattagcctcaagccactgaattacgagcaaaaggatgaaaaagtcgcctttagcggcggcgagttccagttaaatgctgacagagacggcaaagccatctccctttccggggaggcgcaaagtggtcggatagacgcagttaacgaatacaaccagaaagtgcagttgacctttaataatctgaaaaccgacggttccagcacgctggcaagttttggtgagcgtgtaggaaatcaaaaactgagtctggaaaaaatgaccattagtgtggaaggcaaagaactggcactgctggaaggcatggagatcagcggtaaaagcgatctggtcaatgacggtaaaacgatcaatagccaactggattacagcctaaacagcctgaaggtacagaatcaggatctgggcagcggcaagctgactttaaaagtcggccagattgatggtgaagcctggcatcagtttagccagcaatataacgcgcaaactcaggcgctgctggcacagccagaaattgccaacaaccccgaactttatcaggagaaagtgacggaagccttctttagcgccctgccgctgatgctgaaaggcgatccggtgattactatcgcgccgctaagctggaaaaacagtcagggtgaaagtgccctgaatctgagcctgttcctgaaagatccggcaacgactaaagaagcgccgcaaacgctggcgcaggaagtagatcgtagcgttaaatctctggatgcgaaactgaccattccggtggatatggcaactgagtttatgactcaggtagcgaagctggaaggttatcaggaagatcaagcgaaaaaactggcgaaacagcaagttgaaggtgcaagtgcaatggggcagatgttccgtctgaccaccttgcaggacaataccatcaccaccagcctgcaatatgctaacggtcagataacgttaaatgggcagaaaatgagcttagaagattttgttggcatgtttgcgatgccagctcttaacgttccggctgtaccggcaattccgcagcagtaattcacggccaaaacgccggagaattttcactccggcgttttcatctgaaaacaaaccagagattgcctgatgcgctacgcttatcaggcctaccttttcctgcaacactttgaatttatgagtttttgtaggctggataaggcgtttacgccgcatccggcataaaaaacgcgcactttgtcaacaatctgaaacgccggagatttttctctccggcgttattttttacttcagcataaagtcatactgaatactcattttcacatcccagtaattcaggcgatcgcccagcgtactgccatcgcgcttttcccgccctttatcggcagcaagaaagaaattcatcccttgtaacggcccttcgctgacccgatagttcataccacctaagatacccgtgccttcaatccgcacatctcgtttactggattcatagccgcgagtcacaatcggtgcaaatgtcagcgtaaattgcggcgttaaacgatagttgacgcccaattgccaggactgcattccttcacggttacgatcaagacttaaactaaagggatagccaatgtcggtatccaccacggcaccattcattgcatggcgcaaataaccaccactgccaaatacacttccccacggcgcattccaggtcaattgtccactaaccaacgccgtttcattgggctggctggtattacgacttaaaccttcgagctgcgcgtaaaagccgagcaactcccctttcaacgtataattcgggtcgagcggtatgcttttctcgagaatactttgtatctgattggaaacatctttctgtacgcttgcccccagagaatagcgactggtatcatcatgccaactggcggctaaaaaagaacgtgcgcgatgtttatcgtattttcccgtctggctgttatacaccccttcatcacgaataccggttgtactatcagtccataaaaatactcgactacgccacattccccacagatcaatatttggtgttaaagcccaataacctaatgctccttcagaaactgtcggtaatgtacgttggctactgccagccattaacggaatacgataaggtaagctaccataactataatccgtcccgaagcgacctaatttaagcaggctattttcactgggttttatttttactgcccccagggcaaagccaaaacttttatcaccatcaagataccaccgggtactcatatcagcacgagcacctaatttataaacataatacgccccgccttcaacgccaataatattggaataataaccactattgaaatcgagcaatcctccctgtacccatgcgtaaatatctcttcccgcgccagcactgggcttatccgccctgcgcaattcgtttttcagtctgatgcgtagtcccgcttcatcgtcagccagttgcgccgcataagcagaggtaaggccagaggcagccgtcaggcaaataacggccatggccactatttttctcatagttgcacctttgatgttctgattatttttattgaatattaattagtgatatcgctgattaattgctgctgcacttttttacgattatcaatttcaaccacgatttctttgaattttttatccgtgagcggataaaaccagataataacgaatgccagtagcataaatccgcaaggtactaaggcaatacttgtgcggatgcccataataacttccggcgtttgcacctgattggcgatatatccgcttaaccccaaaataaaggcaggaatactacctccgattgcctgaccgcatttacgggtaaaactgaatagactataggtgagcccttcaattcgcacgccggtcaggtattcaccgtattctacggtatcagcttccagcgcccacatcacggtcatggtaacgccctgaccaatactagcgatggccaacgcaaccaacgccaccggcagactccagacggaaacccagaagaacagcagataaccgcaggttcccagcaaagcgccaatcaggaaggtattctttttaccgatcctcgcgaccatccccggcaccagcggtgcgcttgccacagtaccaaccaggttttgcaccagtaccagcacagtgaacagcccggtatcatttaacacatagcgcacgtagaacaagctgctggcgctgaccgcaaaggtgctaatcagcacacacagcgcaccgatgcacaacataaacagcgggcgattccgtttcagggtttgcagactgatattcaaactcggctgcgcaacgatacgtaccacattctcacgcgtgcttttgaagcagatgaagtaaagcaccattccggcaatcgccagcacaattgtccagaaatggtatacgctcaccatctcttccgggctggagttcttaatgctcggtcctatcagaaatgccaggcagacaaaggtcaaactagcggcaatcccacgagccgcgcccagacgggcgcgggattgtggttgttgggtcatcgcggtagcaagactaccataaggaatattcaccaggctgtagcaaagcccgaggcccatgtaggtcaaatatgcatacaccactttgctaccatggctccagtcggtcagcacccagaataccagcacgctgaagatcattaacggcgcagtaccgaagagtaaaaacgggcggaattttccccagcgggtattcacactgtccaccactcgtccggcaaagacgtcggcgaaggcatcgaatacccgcaccagtaacagcatggtgcccgccgcagcggcaccgacgccagcgacgtcggtgtagtaactcaacaggaagagcgcccccattgcgaaggcgaagttattggcgacgtcaccgaggctgtagccgacgatggtgcgccaggagagttgttgattcattgtttgcctccctgctgcggtttttcaccgaagttcatgccagtccagcgtttttgcagcagaaaagccgcgctcttcggtttgcggtcgcgagtgaagatccctttcttgttaccgccaacgcgcaatatgccttggctggtcgcaaaatcggcgaaattccatacctgttcaccgacgacggcgctgacgcgatcaaagacgcggtgatacatatccagccatgcacactgatactcttcactccacatgtcggtgtacatactgtgcagcccggctaacgtatccacgccgtattcggtgatgataatcggctgatgcagtttctcctgccaggccagaagttctttttccagtaccttctctgccgtttccaaatcgccgctttggacataccatccgtaataacggttcaggcacagcacatcaaagagatcgctgatggtatcggtgtgagcgtcgcagaacattacattgacgcaggtgatcggacgcgtcgggtcgagtttacgcgttgcttccgccagtggcgcgaaatattcccgtgcaccttgcggacgggtatccggttcgttggcaatactccacatcaccacgcttgggtggtttttgtcacgcgctatcagctctttaatcgcctgtaagtgcgcttgctgagtttccccgttgactgcctcttcgctgtacagttctttcggcttgttgcccgcttcgaaaccaatgcctaaagagaggttaaagccgacagcagcagtttcatcaatcaccacgatgccatgttcatctgcccagtcgagcatctcttcagcgtaagggtaatggctggtacggtaggagttggccccaatccagtccattaatgcgtggtcgtgcaccatcagcacgttatcgaatcctttgccacgcaagtccgcatcttcatgacgaccaaagccagtaaagtagaacggtttgtggttaatcaggaactgttcgcccttcactgccacactccggatgccgacgcgaagcgggtagatatcacactctgtctggcttttggctgtgacgcacagttcatagagataaccttcacccggttgccagaggtgcggattcaccacttgcaaagtcccgctagtgccttgtccagttgcaaccacctgttgatccgcatcacgcagttcaacgctgacatcaccattggccaccacctgccagtcaacagacgcgtggttacagtcttgcgcgacatgcgtcaccacggtgatatcgtccacccaggtgttcggcgtggtgtagagcattacgctgcgatggatcccggcatagttaaagaaatcatggaagtaagactgctttttcttgccgttttcgtcggtaatcaccattcccggcgggatagtctgccagttcagttcgttgttcacacaaacggtgatacgtacacttttcccggcaataacatacggcgtgacatcggcttcaaatggcgtatagccgccctgatgctccatcacttcctgattattgacccacactttgccgtaatgagtgaccgcatcgaaacgcagcacgatacgctggcctgcccaacctttcggtataaagacttcgcgctgataccagacgttgcccgcataattacgaatatctgcatcggcgaactgatcgttaaaactgcctggcacagcaattgcccggctttcttgtaacgcgctttcccaccaacgctgatcaattccacagttttcgcgatccagactgaatgcccacaggccgtcgagttttttgatttcacgggttggggtttctacaggacgtaacataagggactcctcattaagataataatactggtcaacctttaatctgattagttaaccaattctgtgttgcacacagttatctgtgagaaacccatggaagagaaatggaaataaaaagaactgacaccgcgatcaaaaaaccaaaaactgcaatacccacagcgtgatatagatcgcattaatctttaaaacagcgttgacagaagccataaaataagcaaccgaacgttcgttcgagcgtattgggaacgataaactctcatgacatatggctacagtgaatattttggggggaattctccgaagccgggaaggataatttttgcacagagaaattacgatatgaaacgcgggcacagttatcaccagcccgccgaaaaagagagagaatcaggatgcggttaagataccgccaatcatcgcgcgtaatccctgagcaaagctcgcttcacgcgccaggtcttccgcttcgatatcggccagtacaccgtaggtcagatccagcagtaaacgactagtcattgccgtgttgatgtctgggcttatctcgcctttttgctgggcatcacgcatccgctgggcaacaaattccgtgatcgtcatatgcttatttttaagcatggcggcgacctgtgggttacgcatcccttccgccataatttcaaccaccagcgcccgttgtccaaaggcttcatgggtgagagagacaatggactcgaccatatagtcaacgaaatgaatcccttcaatcggttcccggaaacgggccagcgccctctcctggtcctgtaagataatcgcctgaatcaaggcttctttggagatgaaatggtgatagagcgtcccgggactaatggcgcaagatttacagatggctttcatgctggcactgtgaaatccattttcactaaaaatctctctggcagcattgaggatccgggtccgtgtcggttgtgcttcagtctgcatgttatccatcattaaaccattatagttagcgtgaataactagtttaccgcgttgtcaggtgagcgcctatcattgctgttgaatagtgcgaaggcacactctattcgtatacttttcactctgaaattggttaaccaatagccgtgatttggctgccagttatttagcagagacgttgatgagtttatcccggtaaacaacacgcacggttgtttaccggtccgttagtgtattaattgagctcctgtaccccaccaccggagacggtgagaatttgtccgcttacccagctcgcagcagggctgcaaaggaacagcgctgcgttagcaatatcttgcggttggcccagacgtctgatcggcgtgtgctgtaacattttttgttcaatttctggtgtaataacggatttcagggcatcggttaatattgcccccggcgcaatgccatttacccgaatatttttttcacccaggtcaaacgccatatttctgaccagatgactggccgcagctttagaacttgcataggaagtcatgtttatatttttattttctgccgccatagaagtgatggtcagaataacgccaccgccatttttttccatttctggcgcaacaagttgactcagatggaaaaaagaaaacacattcagttcataagcacggcgaaaatccgccattggcatatcaaacggtttaggtccaccgccaccggcgttgttaaccagaatatcaactttacccagcttactgatagcaaagtctgccagtgcagagagttcctgttcggaagtaatatcacaacggcaggcaaatgcctgaccacccagttgttgaatttcgtctacaacatggttagctgcgtcggcgttaatatcactgaccaccacagatgcgccagctgtcgcgaatgtaatggcgatttctttaccaatacctgcacccgcacctgtgatgatggcgcattttccgtcgagtctcaggttgtcagaattaaacacataaacctcctgtgaacttcagtaaaaataaaaggcaccgcctgtgtgccacattttttatcattaaccttgaggaaaggacactaccaggtatagcagataaagagaggattatttcgctgcaatgagccgggcgggaataataagattgcgactatgcgtctcttcatgggtgattttttgcatcatgcgatccgcaagtgtgataccaagttcccgcgctggcgtgctggcccaggtaacaggtatatcatcaagtgtggttggtgtcgcatcggtaaatgccgccaggctaacctgttgctcaaagtaacgatcgactccgctttccccgctttgccgccctgctttgagcaaaccaaaccatgcccccatcgcaatagtttcgttatagcaaaccacggcactgatggtcgggttatgacgtaaaagcgccgtgatagcttccgcggcttgcttctggctggaagtgcactccaacacccaatcgctatgaaacggcaggccaaattttagtagagttgcacaatagcccccaacccgttctgcacgggttaaactggaactttgccctcccagccaggcgatccgctgatgcccattgcgaatgagatgctccgtcaacaactgtgcagcctgcatgttgtccgggcgaaccgtatcaacatcatcaagataactggcacgggaagcgaaaatcaccgggatagctttttcttctgccatccgtcgcaggtcatcgctacttcctgcagctccggcaattaccacaccatcgacaccctgattcagtaacagactaaaccgctgtgccagctgctcaccgtctttaccgccgtgaagcaaaaaaaccatccgtccctgcgcttccagagcttccgtcaatccggccgtcaattcggcgtaaaacggcgcagataaatcacggacgatcaaaccaatgacgccgctttgcccgccgcgcagcgcgctcgcctggcgattgcgcacaaatcccagctcttcaatggcggcgttaacgcgttctcctgtggcggtagagattcgccctttgccactaagcaccaggctaacggtacttacgctcacgcccgcagccagcgcaacatcatgaatggttatttttttggcggtagccatgcagatgacctactccctgattatgtgacagataaaacgttttaccttttatttatcttatacccgctattatcgttgcgtaatgtgatttatgcctcactaaaatttgataaaacgttttatcttctcgcgcaatttactgaatccagattgttctctacgaggagtcgttttatgacggcgaaaacagcaccgaaagtcacgctgtgggagttcttccagcagttaggcaaaaccttcatgttacccgtggcattattgagcttctgcggcattatgctcggcattggtagttctcttagcagccatgatgtcataaccctgatcccggtcctgggcaaccccgtgttgcaggctatctttacctggatgagtaagattggcagctttgcttttagtttcctgcctgtcatgttctgtatcgccatcccgctgggcctggcacgcgaaaataaaggcgtagcggcattcgctggcttcatcggttatgcggtaatgaacctcgcggtaaacttctggttgaccaataaaggcattctgccaaccacggatgccgcggttctgaaagccaataacatccagagcattcttgggatccagagcatcgataccgggatcctcggtgcggtgatcgccggtattatcgtctggatgctgcatgagcgtttccataatatccgcctgccggatgcgctggcattcttcggcggtacgcgcttcgtaccaattatctccagcctggtgatgggccttgtcggcctggtgattccattagtctggccgattttcgccatgggtattagcggcttgggccatatgataaacagcgcgggtgatttcggaccgatgctgtttggtaccggtgaacgtctgctgttgccgtttggtctgcatcacattctggtggcattaattcgctttaccgacgcaggcggcacgcaggaagtctgcggtcaaaccgtcagcggcgcactgaccatcttccaggcgcaattgagttgcccgaccactcacggtttttctgaaagcgccacgcgtttccttagccaaggtaaaatgcctgcgtttctcggcggtctgccaggtgcagcgttagctatgtatcactgcgcgcgcccggaaaatcgccataaaattaaaggtctgctgatttctggcctgatcgcctgcgtcgttggcggcactaccgaaccgctggaattcctgttcctgttcgtagcgccagttctgtatgtcatccacgcgctgttaaccggcctcggcttcaccgtcatgtctgtgctcggcgtcaccatcggtaataccgacggcaatatcatcgacttcgtggtgttcggtattttgcatggtctgagtaccaagtggtacatggtgccagtggtggcggcaatctggtttgtcgtttactacgtcatcttccgtttcgctatcacccgcttcaatctgaaaaccccggggcgcgatagcgaagttgccagcagtatcgaaaaagccgttgccggtgcgccgggtaaaagtggttacaacgttcctgcaatcctcgaagcattaggcggtgccgacaatattgtcagcctcgataactgcattacccgtctgcgtttgtctgtgaaagatatgagccttgttaatgtgcaggcactgaaggacaatcgggcaattggcgtagtacaacttaatcaacataacctgcaggttgttatcgggccacaagttcagagtgtaaaagatgaaatggccggtctgatgcatactgtccaggcataaggataagatatgttcgattttagtaaggtcgtggatcgtcatggcacatggtgtacacagtgggattatgtcgctgaccgtttcggcactgctgacctgttaccgttcacgattagtgacatggattttgccactgccccctgcattatcgaggcgctgaatcagcgcctgatgcacggcgtatttggctacagccgctggaaaaacgatgagtttctcgcggctattgcccactggttttccacccagcattacaccgccatcgattctcagacggtggtgtatggcccttctgtcatctatatggttagtgaactgattcgtcagtggtctgaaacaggtgaaggcgtggtgatccacacacccgcctatgacgcattttacaaggccattgaaggtaaccagcgcacagtaatgcccgttgctttagagaagcaggctgatggttggttttgcgatatgggcaagttggaagccgtgttggcgaaaccagaatgtaaaattatgctcctgtgtagcccacagaatcctaccgggaaagtgtggacgtgcgatgagctggagatcatggctgacctgtgcgagcgtcatggtgtgcgggttatttccgatgaaatccatatggatatggtttggggcgagcagccgcatattccctggagtaatgtggctcgcggagactgggcgttgctaacgagcggcagcaaaagtttcaatattcccgccctgaccggtgcttacgggattatagaaaatagcagtagccgcgatgcctatttaagcgcactgaaaggccgtgatgggctttcttcccctagcgtactggcgttaactgcccatatcgccgcctatcagcaaggcgcgccgtggctggatgccttacgcatctatctgaaagataacctgacgtatatcgcagataaaatgaacgccgcgtttcctgaactcaactggcagatcccacaatccacttatctggcatggcttgatttacgtccgttgaatattgacgacaacgcgttgcaaaaagcacttatcgaacaagaaaaagtcgcgatcatgccggggtatacctacggtgaagaaggtcgtggttttgtccgtctcaatgccggctgcccacgtagcaaactggaaaaaggtgtggctggattaattaacgccatccgcgctgttcgttaaccccaattgcgcaacgtaaaaaatcgttgcgcaatcgtggatttttaccctgctttgtttttataatggtgcgcacttttatatccagaaaaagagtgcgaccatgattgataccaccctgccattaactgatatccatcgccaccttgatggcaacattcgtccccagaccattcttgaacttggccgccagtataatatcagccttcctgcacaatccctggaaacactgattccccacgttcaggtcattgccaacgaacccgatctggtgagctttctgaccaaacttgactggggcgttaaagttctcgcctctcttgatgcctgtcgccgcgtggcatttgaaaacattgaagatgcagcccgtcacggcctgcactatgtcgagctgcgttttagtccaggctacatggcaatggcacatcagctgcctgtagcgggtgttgtcgaagcggtgatcgatggcgtacgtgaaggttgccgcacctttggtgtgcaggcgaagcttatcggcattatgagccggaccttcggcgaagccgcctgtcagcaagagctggaggcctttttagcccaccgtgaccagattaccgcacttgatttagccggtgatgaacttggtttcccgggaagtctgttcctttctcacttcaaccgcgcgcgtgatgcgggctggcatattaccgtccatgcaggcgaagctgccgggccggaaagcatctggcaggcgattcgtgaactgggtgcggagcgtattggacatggcgtaaaagccattgaagatcgggcgctgatggattttctcgccgagcaacaaattggtattgaatcctgtctgacctccaatattcagaccagcaccgtagcagagctggctgcacatccgctgaaaacgttccttgagcatggcattcgtgccagcattaacactgacgatcccggcgtacagggagtggatatcattcacgaatataccgttgccgcgccagctgctgggttatcccgcgagcaaatccgccaggcacagattaatggtctggaaatggctttcctcagcgctgaggaaaaacgcgcactgcgagaaaaagtcgccgcgaagtaacaaaatggatggtgcaaatgcaccatccatttttcatgcaaggcacaaagtcgcgcgatgtttggcggattcgatgcccagctcaatcaactccattacctggattgcctggcttgccggaaccggattttcaccatcgccatttaacgcatcacgaatagccgcatagtaagccggataattcccaggcaccgtcaacagcgtttcttcgacacgttcctcaccttccacgcgggtaagtacgccatcacgcatatcgtagccccagtcttcctgcggtagacgctcgccatttttcagacgttcttcctgtggatcgaggccatatttcacataactgcctcgggatccatgcacgatataccgtgcactctcagcggctgccagcatggtaccgtgtaaaatgactcgccgctgtggataggacaagatggcgtggaaataatcggtgctctgcgctccgggccgtaactgtgccaaatctaccgtcatgctgaccggtaaaccaaaaagcgtaatggcctgatcaagaagatgtggtgctaaatcgtaccagataccgctgcctgggccgccctgttcacgccaacgatcgcgcacctgcggacggaagcggtcaaaatgagactcaaagtaagcaacttcacccagcacgccttccgcgagtaaaccttttagcgtcaagaaatcgctatcccagcgacggttatggaatacagacagcacacgccccaggctttttgccagcgcatccagctctcgcgcttgactcagtgtcacggtaaagggtttatcaacgaccacatgtttacccgcctcaagcgccgctttggctaacgggaaatgggtatcgttgggtgtaggaatgacaatcaggtctatgttgggatcgttaaacagatgcttcggctcagagacaaccgtaaccgttggccagtcggcttttacttttgtttcatcactgctggagattaccgccagttcctgcccgggcgtgcccgcaatcaggggcgcatggaaggttttgctcgcataaccatacccaatcaacccaacacggatgttgtcgctcatgtcattgcctctcattgaagtatgatggctatttgacactatcctttacccacgctcaacagtttaataacctgccagcaataagggatgttgtttaacttaagtcaaaaaaatagcgaattttccaacgacaaaagctaaatatcgcaaaaacctcagtaaaaatcttgctggagctattattgctaagtaacatttaccccctgaagttaatggatcaatcaagagagatgtgggctgtaatgaatcgtcttattgaattaacaggttggatcgttcttgtcgttagtgtcattcttcttggcgtggcgagtcacattgacaactatcagccacctgaacagagtgctagcgtacaacacaagtaagctctgcacttgtggagcgacatgctgcccgtccgggtgcatgttttcacttgtcggatattaaaccaggaatttattatcttgttcgatgttgttggtgattgtcagggatagtaaagcgcgttactcttttcagagcagtttttcatccctgaatatttgccatcagcgcattcttattattgtaataacacaagcgttcacttttggtgaaattttatcatcactaataatacctacccctttggtattaattattttatggaccttttatgactgttcaggactacttattaaaatttcgcaaaatcagtagtctcgaaagtctggaaaaactctacgaccatcttaattacaccctgacggacgatcaggaactgatcaatatgtatcgtgctgccgatcaccgtcgcgcagagctggtttctggcgggcgtttgtttgacctcggccaggtaccgaagtccgtctggcactatgtccaataaagaaagtagcgatcggttataaaagccttataataacgcccctaaaattagatttgcctgtttgcgtcgctattctggagaacctatgaccaccacaacgccacaacgtattggaggctggttgcttggcccgttggcctggcttttagtcgctctgttgagtacgacgctggcgttgttgctgtataccgctgcgttatcttctccgcaaacatttcaaacgctcggcggacaagcactgacgacacaaatcttatggggcgtttcttttattaccgctatcgccttgtggtattacacactgtggttgaccatcgctttctttaaacgtcggcgttgtgttcctaaacactatattatctggctgcttatttccgtattgctggcagtaaaagcattcgcttttagtcccgtggaagatggcatagccgttcgccagttgctgtttactttgttggcaaccgcattgatcgtcccctatttcaaacgcagcagccgggtaaaagcgacgtttgtgaatccgtaataaccttacagttaacctgttgtcgcctgctctggattaacggataataggcggcttttttatttcaggccgaaaaatgactgactacctgttactgtttgtcggaactgtactggtcaataactttgtactggtcaagtttctcggtctctgtccgtttatgggggtttccaaaaaactggaaaccgcgatgggcatggggctggcaacaacgtttgtgatgacgctggcgtctatttgcgcctggcttatcgatacgtggattttgatcccacttaatctgatttacctgcgcaccctggcatttattctggtgattgctgtggtcgtgcagttcaccgagatggtggtgcgcaaaaccagcccggtgctttaccgtctgctggggatttttttgccgcttatcaccaccaactgtgcagtgctcggcgtggcgttgctgaatatcaatctcgggcacaatttcttgcagagcgcgctgtacggtttttccgccgctgtcggtttcagcctggtgatggtgctcttcgccgccatccgcgaacgccttgctgtggctgatgtcccggcaccttttcgcggtaatgccattgcgttaattaccgcaggtcttatgtctctggcctttatgggctttagtggtttggtgaagttgtaatgaatgctatctggattgccgttgccgccgtgagcctgctgggcctggcgtttggcgccattctgggttatgcctcccgccgttttgcggtggaagacgatccggtcgttgagaaaattgacgaaatcttaccgcagagccagtgtggtcagtgcggttatcccggctgtcgcccctacgcggaagccatcagctgtaacggtgaaaaaatcaaccgttgcgccccaggtggcgaagctgtgatgctaaaaattgccgagttgcttaatgtcgagccgcagccgctggatggcgaagcgcaagagataacgcctgcgcggatggtggcggttattgatgaaaataactgtattggctgcactaaatgtattcaggcgtgtccggtagacgccatcgttggcgctacccgtgccatgcatacggtaatgagtgatctctgtacgggctgcaatttatgtgttgatccgtgcccgacgcactgcatcagcttgcaaccggtcgcagaaacacctgactcctggaaatgggatctgaacaccattcccgtgcgtatcattcccgtggaacaccatgcttaagttattctctgcattcagaaaaaataaaatctgggatttcaacggcggcatccatccaccggagatgaaaacccagtccaacggtacacccctgcgccaggtacccctggcgcagcgttttgttattccactgaaacagcatattggcgctgaaggtgagttgtgcgttagcgtcggcgataaagtattgcgcggccagccgcttacccgtggtcgcggcaaaatgctgcctgttcacgcgcccaccagcggtaccgttacggctattgcgccccactctacggctcatcctagtgctttagctgaattaagcgtgattattgatgccgatggtgaagactgctggatcccgcgcgacggctgggccgattatcgcactcgcagtcgcgaagagttaatcgagcgcatacatcagtttggtgttgccgggctgggcggtgcaggattcccgacaggcgttaaattgcagggtggcggagataagattgaaacgttgattatcaacgcggctgagtgcgagccgtacattaccgccgatgaccgtttgatgcaggattgcgcggctcaggtcgtagagggtattcgcattcttgcgcatattctgcagccacgcgaaattcttatcggcattgaagataacaaaccgcaggcgatttccatgctgcgcgcggtgctggcggactctaacgatatttctctgcgggtgattccaaccaaatatccttctggcggtgctaaacaattaacctacattctgaccgggaagcaggttccacatggcgggcgtagttccgatatcggcgtattaatgcaaaacgtcggcactgcttatgcagtgaaacgtgccgttattgatggcgagccgattaccgagcgtgttgtaaccctgactggcgaagcaatcgctcgcccgggcaacgtctgggcacggctggggacgccagtgcgtcatttattgaatgatgccggattctgcccctctgccgatcaaatggtgattatgggtggcccgctaatgggctttaccttgccatggctggatgtcccggtcgtaaagattaccaactgtctgttggctccctctgccaatgaacttggcgaaccacaggaagaacaaagctgcatccggtgtagcgcctgtgctgacgcctgccctgcggatcttttgccgcaacagttgtactggttcagcaaaggtcagcaacacgataaagctaccacgcataacattgctgattgcattgaatgtggggcttgcgcgtgggtttgcccgagcaatattcccctggtgcaatatttccgtcaggaaaaagctgaaattgcggctattcgtcaggaagaaaagcgcgccgcagaagccaaagcgcgtttcgaagcgcgccaggctcgtctggagcgcgaaaaagcggctcgccttgaacgacataagagcgcagccgttcaacctgcagccaaagataaagatgcgattgctgccgctctggcgcgggtgaaagagaaacaggcccaggctacacagcctattgtgattaaagcgggcgaacgcccggataacagtgcaattattgcagcacgggaagcccgtaaagcgcaagccagagcgaaacaggcagaactgcagcaaactaacgacgcagcaaccgttgctgatccacgtaaaactgccgttgaagcagctatcgcccgcgccaaagcgcgcaagctggaacagcaacaggctaatgcggaaccagaacaacaggtcgatccgcgcaaagccgccgtcgaagccgctattgcccgtgccaaagcgcgcaagctggaacagcaacaggctaatgcggaaccagaagaacaggtcgatccgcgcaaagccgccgtcgaagccgctattgcccgtgccaaagcacgcaagctggaacagcaacaggctaatgccgagccagaacaacaggtcgatccgcgcaaagccgccgtcgaagccgctattgcccgagccaaagcgcgcaaacgggaacagcaaccggctaatgcggagccagaagaacaggttgatccgcgcaaagctgccgtcgaagcggctattgcacgcgccaaagcacgcaagctggaacagcaacaggctaatgcggtaccagaagaacaggttgatccgcgcaaagcggcagttgccgcggctattgcccgcgctcaggccaaaaaagccgcccagcagaaggttgtaaacgaggactaaatggtattcagaatagctagctccccttatacccataaccagcgccagacaagccgcattatgctgttggtgttgctcgcagccgtgccaggaatcgcagcgcaactgtggttttttggttggggtactctcgttcagatcctgttggcaagcgttagtgctctgttagccgaagctctcgtactcaaactacgcaagcagagcgtagccgcaacgttgaaagataacagtgcattgctgacaggcttattgctggcggtaagtattccccccctcgcgccatggtggatggtcgtgctgggtacggtgtttgcggtgatcatcgctaaacagttgtatggcggtctgggacaaaacccgtttaatccggcaatgattggttatgtggtcttactgatctccttccccgtgcagatgaccagctggttaccgccacatgaaattgcggtcaacatccctggttttatcgacgccatccaggttatttttagcggtcataccgccagtggtggtgatatgaacacactacgcttaggtattgatggcattagtcaggcgacaccgctggatacatttaaaacctctgtccgtgccggtcatagcgttgaacagattatgcaatatccgatctacagcggtattctggcgggcgctggttggcaatgggtaaatctcgcctggctggctggcggcgtatggttgctatggcagaaagcgattcgctggcatattcccctcagcttcttagtaacgctggcgttatgcgcaatgttgggctggttgttcagtccagaaacactggcagcaccgcaaattcatctgctgtctggagcgaccatgctcggcgcattctttattttgactgacccggttaccgcttctacgaccaatcgtggtcgtcttattttcggcgcgcttgcgggcttattagtctggttgatccgcagtttcggcggctatcctgacggcgtggcttttgccgtcctgctggcgaacatcacggttcctctgatcgattactacacgcgtccgcgcgtctacggccatcgcaaagggtaaaccatgctgaaaactatccgaaaacacggcattacgttggcgctatttgcagcgggtagtacagggttaactgcggccatcaaccagatgaccaaaacgacgattgctgaacaggccagtctgcaacaaaaggcgttatttgatcaggtgctgccagccgaacgctataacaatgcgctggcacagagttgctatctggtaactgcgccagagttaggtaaaggtgagcatcgggtttacatcgccaaacaggatgacaaaccggtagccgccgttctggaagcaaccgcgccagatggctattccggtgcgattcagctgctggtgggagccgattttaacggcacggtacttggcacgcgcgtgacagagcaccacgaaacgccagggcttggcgataaaatcgaactgcgcctttctgactggatcacccattttgcgggtaaaaaaatcagtggtgcagatgatgcgcactgggcggtgaagaaagatggtggtgatttcgaccagttcaccggcgcgacgattactccccgcgcggtggttaatgcggtaaaacgcgccggattgtacgctcagacgttaccggcacaactttctcaacttcctgcctgtggagaataaagcgtgagcgaaattaaagacgttattgttcaggggttgtggaaaaacaactctgcgctggtccagttgctcggcctttgtcctctgttggcggtcacgtccactgccactaacgctctgggtttaggacttgcgactacgctggtactgacgctgaccaacctgaccattagcacgctgcgtcactggacgccagccgagatccgcattcccatttacgtgatgatcatcgccagcgtggtcagcgctgtacagatgctgatcaacgcctacgcctttggcctgtatcaaagtttagggatttttattccgctgattgtcactaactgtatcgttgtgggccgcgctgaagccttcgccgccaaaaaaggtccggcgcttagcgcactggacggctttagtattggtatgggcgcaacctgcgccatgttcgtgctgggtagtctacgcgaaattatcggcaatggcacattgtttgacggtgcagatgcgctgttaggtagctgggcaaaagtattacgcgtggagattttccacaccgactcccctttcctgctggcgatgctgccaccaggtgcatttattggcctgggactgatgctggcaggaaaatacctgattgatgaaagaatgaaaaagcgccgtgctgaagcagctgcagaacgtgcattgccaaacggtgaaacagggaatgtctgatgaataaagcaaaacgcctggagatcctcactcgcctgcgtgagaacaatcctcatcccaccaccgagcttaatttcagtagcccttttgaattgctgattgccgtactgctttccgctcaggcgaccgatgtcagtgttaataaggcgacggcgaaactctacccggtggcgaatacgcctgcagcgatgcttgaactgggcgttgaaggggtgaaaacctatatcaaaacgattgggctttataacagcaaagcagaaaatatcatcaaaacctgccgtatcttgctggagcagcataatggcgaggttccggaagatcgtgctgcgcttgaagccctgcccggcgtaggtcgtaaaacagccaacgtcgtattaaacactgcattcggctggccgactattgctgtcgacacgcacattttccgcgtttgtaatcgtactcaatttgcgccggggaaaaacgtcgaacaggtagaagaaaagctactgaaagtggttccagcagagtttaaagtcgactgccaccattggttgatcctgcacgggcgttatacctgcattgcccgcaagccccgctgtggctcttgtattattgaagatctttgtgaatacaaagagaaagttgacatctgaagaaaaggggtaacaccgattaccccattgataacctttctttatcctcttttaaaacatctttttaacgtcaatgatgccattgcttagcgttatcatcaggtaatccgtttgcggataaccaaaaatgcaggttaattgtttttttaatagcgaaattttctattcattcgtgatcaagatcacgatgctgtcgcaatgtaaaaacattgcaagaatcaggttaaaatcatttaaatttacacacgcaacaaatattgacctacaaaacattacactggctatttttcagaaactggactatctcactagtaaaaacgctaaatagcagaacatatcgccgttaagccatcacccccctctcagtgcagtgaaaaaatctgccgttacgttttttgaaaaatttaacgctggataacatttcccggaatggttgaattccccgcctcagttatatgtaacagattattacaaaggacttgtctgaaagtgcaagatagtgaacattacctgccgtttcccctcccactataacaattgcgcgtatgttttttatacataacgcgagaaagcacccccgttaatatgggatgtaaaaaaagaggtaaaagtgtccactgcaaaccaaaaaccaactgaaagcgtcagtttgaacgctttcaaacaaccgaaggcgttctatctcatcttcagcattgagttatgggaacgttttggttattacggcctacaaggaattatggctgtttacctggttaaacaactgggtatgtctgaagcggatagtatcacccttttctcttcctttagtgccctggtttatggtctggtcgctatcggcggctggttaggtgacaaggtactgggtactaaacgcgtaattatgctcggcgctattgtgctggcgattggttatgctctggttgcctggtctggtcacgacgccggtatcgtttatatgggtatggcggctattgcggtcggtaacggcctgtttaaagctaacccgtcttctctgctttctacatgctatgagaaaaacgacccgcgtctggacggtgcattcaccatgtactacatgtccgtcaacatcggctctttcttctctatgattgctacgccgtggctggccgcgaaatacggctggagtgttgcgtttgcgttgagcgttgtaggcctgctgatcactatcgttaacttcgccttctgccaacgctgggttaaacagtacggtagtaaaccagacttcgagcctatcaactaccgtaacctgctgctgaccattattggtgttgtggcactgatcgctatcgccacctggctgctgcacaatcaggaagttgcgcgtatggcgctgggcgttgttgccttcggtatcgtggttatcttcggtaaagaagccttcgcgatgaaaggtgctgcgcgtcgtaaaatgatcgttgccttcatcctgatgctcgaagccattatcttcttcgtgctgtacagccagatgccaacgagtctgaacttctttgcgattcgtaacgttgagcactccattctgggtctggccgtagaacctgagcagtatcaggcactgaacccgttctggatcatcatcggtagtccgattctggccgctatctataacaagatgggcgataccctgccgatgccaaccaagtttgcaatcggcatggtgatgtgttctggtgcgttcctgattctgccgctgggtgcgaaattcgcgtctgacgctggtatcgtgtctgtaagctggctggtcgcaagctatggcctgcagagcatcggggaactgatgatctctggtctgggtctggcaatggttgctcaactcgttccgcagcgtctgatgggcttcattatgggtagctggttcctgaccactgccggtgcaaacctgattggtggttatgttgcgggtatgatggctgtgccggataacgttaccgatccgctgatgagtctggaagtctatggtcgcgtattcttgcagattggtgtcgctactgccgttattgcagtactgatgctgctgaccgcgccgaaactgcaccgcatgacgcaggatgacgctgcagacaaagcggcgaaagcagccgtagcgtaaaattcagggaaactcttttacaagccgctaacttttcgttagcggctttttttttgttcagcaacgcactaccatactttaaaccacagacaaaaggagttaccgatgaaattgttctacaaaccgggtgcctgctctctcgcttcccatatcaccctgcgtgagagcggaaaggattttaccctcgtcagtgtggatttaatgaaaaaacgtctcgaaaacggtgacgattactttgccgttaaccctaaggggcaggtgcctgcattgctgctggatgacggtactttgctgacggaaggcgtagcgattatgcagtatcttgccgacagcgtccccgaccgccagttgctggcaccggtaaacagtatttcccgctataaaaccatcgaatggctgaattacatcgccaccgagctgcataaaggtttcacacctctgtttcgccctgatacaccggaagagtacaaaccgacagttcgcgcgcagctggagaagaagctgcaatatgtgaacgaggcactgaaggatgagcactggatctgcgggcaaagatttacaattgctgatgcctatctgtttacggttctgcgctgggcatacgcggtgaaactgaatctggaagggttagagcacattgcagcatttatgcaacgtatggctgaacgtccggaagtacaagacgcgctgagtgcggaaggcttaaagtaatagccatcggcccacaggtcgttgtgggccgaaatgagatatttcagagctttgttgcgctgaagtaatgttctggtttggcaatacgatcctgagcagccaccacttgcagctcatattcctgcattgctttggtggtcaccatgatttcgtagactgcagcggtcacatgttccagcgcctcctgcagcgttgccccctgaagcagtttcaccagcagtaaaccgctcgtcacatcaccaacacctaccggctggcgcataccaaaatccaccagcggacggctgatatgccaggcttcatcggcggtgaccagcagcatttcaaaacggtcacggctgtagccagctcgcgccaggtgtttaaccaacacaatttgtggcccttgcgcaatgagttcgcgcgctgccagaaccgcttcttcgacgttatttaccgcatgctcacagagtatttccagctcaaccagatttggcgcaatgatatcgctggcaggcaaaccgtgccgcacatgaaactctgcgacacccggtgcaacgatacagcctttttccggatgacccattaccggatcgcaaaaatatttcgcctgcggattcgcggctttcacctgacggacgataccgaggatatgttcaccctgctccgcgcttcccagatagccacttaatacggcatcacaggtgtgtaatttatcaatggcggcaatgccttgcacaatttcggttaaatggctgggcggcatcacgcagccagtccatttgccgtattgggtgtgattagaaaattgaacggtgttcagcggccagacgttcgcgcccaggcggcgcatcggaaactctgccgcactgttacccgcatgaccataaacaacgtgagactggatagcgagaatatttttcatcatgttccctgtataaaaaccagggggagtgatttctcactccccctttccacttaatgcattatttccagcaaatcagacagtaattctttttaccgcgacgcagtaaggtaaaacgaccaaacagacgatcttcttctttaaagaagtattcaggatcggactgtttttcaccgttaatggtgatggcattggaggcgatagttttacgtgcctgaccacgggaaggttgcagttcagaatcgaccagtgcctgcatcaggtctgcgcccttttccatctcaaccatcggtacgccgtcctgcgccagctgttcgaagtccgcttcactcagcgcactcaaagaaccgctgaacaggcattcggtaatacgttttgccgcctgtaaaccttcttcaccgtgaaccagacgagtcacctgctccgccagtacatactgggcgcgcggtgctttaccgctgtttttatcttcttcttccagggcgttgatctcttcaatgctcataaaggtgaagaacttcaggaagcggtaaacgtcggcatccgcagtgttgatccagaactggtagaatttgtacgggctggttttcttcggatccaaccagactgcgccgccttcagttttaccaaatttggtgccatctgctttagtgatcagcggaacggtcaggccaaacacctgattctgatgcagacgacgggtcaggtcgataccagaagtgatgttaccccactggtcagaaccaccaatttgcagcaccacaccgtactgtttgttcagacaggcgaagtcataaccctgcaacaggttgtaggaaaactcagtgaagctaatcccctgatcttcacggttgagacgctgcttaaccgcttctttgttgatcatctggttaacggagaagtgtttgccaatatcgcgcaggaaggtcagcacattcatattgccgaaccagtcatagttgttcgccgcgatagcagagttttctccacagtcgaaatcgaggaacggggcaacctgcttacggattttgtccacccactcctgaacagtttcttcggtgttcagcttacgctcggcagctttgaagctcgggtcgccaatcagacccgtcgcgccgcctaccagcgcaaccggcttgtggcccgcctgctggaagcgtttcaggcataacaatggaacaagatgccccaaatgcaagctgtcagcggtaggatcgaagccgcaatagagcgcgatcgggccttgcgccagtcgctctgctaacgcttcctcgtccgtcacctgggctaccagcccccgctcttgcaattgtttaatcaagttactgcttgccatcaaaatctccatgtatataacgactgcacctttgccggtacacgacttttcgccagatgcgaaagagacatagaataaagtgccagaatcaggagtaccagcgattaaagcaagatttttgcatcttttcagggtgcaagacgatcaatcttccacgcatcattttcacgctggtacaaaaagcggtcatgcaggcgatgctcaccaccctgccagaactcaatctgttcaaggctgacgcgaaaaccgccccaaaagctcggcaatggcacttcgccctgttgaaacttctgcttcagctccaggaatttactttcaaggataccgcgggcagaaatgcgactggactgcttgctaacccatgcaccaatctggctatcacgcgggcggctatgaaaatatttcatcacttcgagagtgctaagtcgttctgctttaccgatcaccatcacctggcgctcaagggtatgccacgggaacagcaggctaacgcgcggattattttcgatttgatgtgctttacggctgccgaggttggtgtaaaacaccatgcctttttcgtcgtaatgtttgagtaaaacgatgcgctgataaggctgaccatgttcatccacggtagcgaccaccatcgcggtagggtccgccagtttggcttcacaagcctgagagagccaacgttcaaaaagggttaatggatcggcgggaagatcgcggcggcgtaacccgcctttggtgtattcacggcgcagatgcgcgatttgctgcaattcgtcgttatcagacatggttttctttacggattgtcagtgggtgacgctattgtgcgccgcccctggaaaaatctcaacgctgtggattttgtaactgacagttattcaagacgatgcggtcgcgtttatagacagtcgcttcatcgcctttgctccagaaaacatagattccgtcagtgtaacgcgcgccagaggcactaatgccctgtttgagatgcagtagttgattatcgtaaacaaaactgacctcctggcgcggattattcagtttgaccgtcaacggtttttcatcacactggtattccagcgtatcggtttgcatgcgctcaaccagctgattaaaggcgctacagccggagagaaggaccggcaaaatgataattaacagttttttcatagtcatatcccgaagactttcctggtctggagggcaatacgccctccctaacgttccaagtgtaacggcagacgcggtaagaaaaattcagttaactctgatatcacgggttagcggggaaaatagcccccagtaccgtctcctggcttgcgccagtgacggaaggcagatttcctggtaatcccgccagcgtccgccaggcaagccaggcgaaagccaatgcttccatgtcatcgccactaatgccaacggcatcggtggtggtgacttctgtgcctggcagtaatgccgccagacgcgccatgagtagcggattacgactacctccaccacataccatcaatcgttcgcagccaccgctcaacaaaacttgttcagaaatggtcacggcggtgagttctgccagtgtcgcctgcacatctcggggatcaacacccggaaaatggcgcaaatggcgctccagccaaccatagttaaagtattcgcgtccggtgcttttcggtgcaggttggctgaaatacgggtcgctgagcatattttgcagcagtgggagaataactttacccgcccgtgcccactcggcatctttatcgtaaggtttaccggcctgacgccagatccaggcatccatcagcatgttaccaggaccggtatcgtagcccccaaccggctgcccaggaatgagcagactcagattggcgatgccgccaatattgagcaccattcgtcgctcggttgggtgagccagcagcgcatgatggaacgcaggtaccagcggtgcgccttgtcctcccaaggcaatatcgcgacggcgaaaatcaccgacaaccgtaattccggtgcgtgccacaatttgattgttatcgccaatctgtaaagtgtgtggtgccacgcccgtcggttcatgccagacggtttgaccgtgacaaccgatcgcaactatatctcttgcctgcagattttgttccttaagcaaggcattgaccgcatcagcaaaaagttgcccgagttgagtatcaagctgtccaaactggctaagtgtaagctgctggccctggcaaatatccagtacagcctgtttcagagataccgggatcggccaactcaaacttgccagctgtgcgacccggtgttcatcaattgtcgccaacacaacatcaacaccatcaaggctggtgccactcataacgccaataaagcggccgcttttcatagttcatcctttttcaatctgacgtttgcgcaccactcaaacataaacttttcgtgaataccatgcggaatgaccgatttttaccgttggtagtaaaacattatcttcaaatcaataatcatcatgaatgttttgtttataattggttgatcctactttcattatgatttgctcatatttggtagaacatgtaaccatggattcacatatgccatatactttgaccatgagggatgcttgcgtggcgtttcatggtgaacaggagatttttcaatgattaaacgcgtattggttgttagtatggtaggtctgtctcttgtcggttgtgttaataacgacaccctgagtggggatgtttataccgcttctgaagcgaaacaagtacagaatgtcagctatggcaccatcgttaacgtacgtccggtacagattcagggcggtgatgattccaacgttatcggtgcaattggcggtgctgttcttggtggtttcctggggaatactgttggtggcggaaccgggcgttctctggctactgcagcaggcgctgttgcaggtggcgtagctggtcagggcgtacagagtgcaatgaacaaaacgcagggtgtcgagctggaaattcgtaaagacgatggtaataccatcatggtggtacagaaacaaggcaacactcgtttctctccgggccaacgtgtcgtactggccagcaatggcagtcaggtgaccgtttctccgcgctaaataagtttgcgtgtggtcaggttactgaccacacgcccccttcatttcaccctttggcctgtaactcaatgatattatgctcaagttttgcgatgagcgtaatcagttgctccagttcctctgcggagatgccatgtaatatttccgcgcgggttttgttaataacagcttccatttcgctgatcagcggctctgccttttccgtcagtttaatacgtttagcccgacgatcgctggcacaagtttgacggctaattaaccctttttcttccagttggtccagagtacggaccagacttggctgctcgatgccaatcgcttttgccagttgaatttggctctggtctggaggtaactgatggatattgtgtaacgtaacccaatgggtttgtgttaactccagcggtttcaggcgatggtctatcagagcacgccatatgcgcaccaaccgtgccagatcagaacctagtgggctttccaatttcatctccttataattagcttgctaagatattatgcggcttttagaatagtgtgcagcaattgtattgctaaaacaaatgtattgctgcatttggttaccgtcagacatatttttcagaaattgcgcgtaaatttttcgcacttaaagaatatttattaatctaacgcaatatattcggtcgtaaaggaatctactttgtgaagtttatgctcaatgcaacaggattgcccttacaagatctggtgttcggtgcgtccgtctactttcctccgtttttcaaagcattcgcgtttggattcgtcatctggcttgtcgtacaccgcctgcttcgtggctggatctacgccggtgacatctggcatcccttgttaatggatttaagcctgtttgcgatttgcgtttgccttgctctggcaatactgattgcgtggtaactatgagtattaaaacaattaagtatttcagtacaatcattgtagcggtagttgcggttcttgccggatggtggctgtggaattattacatgcaatctccgtggacacgcgacgggaaaatacgcgcagaacaggtttctatcaccccacaggtgagcggacgtattgttgagctgaatataaaagacaaccagctggttaacgcgggggatcttctgctcacgatcgataaaacgccctttcagatcgccgagctgaacgcacaggctcagctggcgaaagcgcaatctgacctcgcaaaagccaataacgaagcgaatcgtcgtcgtcatctcagtcaaaattttatttctgccgaagaactcgataccgctaacctcaatgttaaagcgatgcaggccagtgttgatgccgcacaggcgacgctgaaacaggcacaatggcaactggcgcaaacggaaattcgcgccccggtgagtggatgggtgactaaccttactacccgcatcggcgattacgctgataccgggaaaccgctgtttgcccttgtcgacagccacagcttttacgtcattggttattttgaagaaaccaagttgcgccatatccgcgaaggtgcaccagcacaaattaccctctatagtgataacaaaacgttacagggtcacgtttccagtatcggtcgggcgatttatgatcagagcgttgaaagtgacagtagccttattccggatgttaaacctaacgtcccctgggttcgactcgcccaacgcgttcccgtccgctttgcgctggataaagtcccaggcgatgtcacgttggtgagcggcaccacctgtagcattgccgtaggtcaataatgaacgcaagcagttggtccttgcgcaatttgccctggttcagggccacgctggcgcaatggcgttatgcgttacgcaataccattgccatgtgtctggcgctgacggttgcctattatttaaatctggatgaaccctattgggcgatgaccagcgctgcagtggttagctttcccaccgttggcggtgttatcagcaaaagcctcggacgcatcgctggcagtttgctcggagccattgcggcactgcttcttgccgggcatacgctcaatgagccgtggttttttctattgagcatgagcgcgtggcttggcttttgtacctgggcctgtgcgcacttcacgaataacgtcgcgtatgcatttcaactggcgggctacacggctgccatcatcgcctttccgatggttaatattactgaggccagccagctgtgggatatcgctcaggcgcgcgtttgcgaggtaatagtcggtattttgtgcggcggcatgatgatgatgatcctgccgagcagttccgatgctactgcccttttaaccgcattgaaaaacatgcacgcccgattactggaacatgccagtttactctggcagcctgaaacaaccgatgccattcgtgcagcacatgaaggggtgattgggcagatactgaccatgaatttgctgcgtatccaggctttctggagccactatcgttttcgccagcaaaacgcgcgccttaatgcgctgctccaccagcaattacgtatgaccagtgtcatctccagcctgcgacgtatgttgctcaactggcccagtccgccaggtgccacacgagaaattctcgaacagttgctgacggcgctcgccagtagccaaacagatgtttacaccgtcgcacgtattatcgccccgctacgcccgaccaacgtcgccgactatcggcacgtcgccttctggcagcgactacgttatttttgccgcctttatctgcaaagtagtcaggaattacatcgtctgcaaagcggtgtagatgatcataccagactcccacggacatccggcctggctcgtcataccgataacgccgaagctatgtggagcgggctgcgtacattttgtacgttgatgatgattggcgcatggagtattgctagccaatgggatgccggtgccaatgcattaacgctggcagcaattagctgcgtactctactccgccgtcgcagcaccgtttaagagcttgagtcttctgatgcgcacgctggtgttacttagcctattcagctttgtggtcaaatttggtctgatggtccagattagcgatctgtggcaatttttactgtttctctttccactgctggcgacaatgcagcttcttaaattgcagatgccaaaatttgccgcattgtgggggcaactgattgtttttatgggttcttttatcgctgtcactaatcccccggtgtatgattttgctgattttcttaacgataatctggcaaaaatcgttggcgtcgcgttggcgtggttagcgttcgccattctgcgtccaggaagcgatgctcgtaaaagccgccgccatattcgcgcgctgcgccgggattttgtcgatcagctaagccgccatccaacactgagtgaaagcgaatttgaaagcctcacttatcatcacgtcagtcagttgagtaacagccaggatgcgctggctcgccgttggttattacgctggggtgtagtgctgctgaactgttctcatgttgtctggcaattgcgcgactgggaaagccgttccgatccgttaagccgagtacgggataactgtattagtctgttgcggggagtgatgagtgagcgtggcgttcagcaaaaaagtctggcggccacacttgaagaattacagcggatttgcgacagccttgcccgtcatcatcaacctgccgcccgtgagctggcggcaattgtctggcggctgtactgcagccttagccaacttgagcaagcaccaccgcaaggtacgctggcctcttaattacttaattacaccacaggcatagcgttcaccgccaccgcccagcggtttaggttgatcggacatattatcgccgccaacgtggaccatcagcgctttgtctttgatttcatccagacttttcagacgaggcgcgatgacggcatcggtagctttgccgtcattattgacgaccagtgcaggcagatcgcctaaatgcccggcaccttctggcccttcatgtttaccggtattttgtggatcaagatgcccgcctgcggattccgcggcgctggctttgccatctttggtggctggctggcagcttcctttggcatgaatatggaagccatgttcaccggggggtaatgctttcagatcggggctaaactccagacctttatcggtttcagtaatggtgacgctaccaatactctgccctaccccttggctcgtgacgaggttcatctcgactttttcactggcagcttgtgcgccggttgcaacaaccagcgccagaatagccagactaaaacgtttcataggacctccgttcattgtgcattcctgaataagtgtaaaccagtgacacatttttgaacggcggctattcctaaaagtgcttacggtacgtcgtaccccagtgccgctttacggatacgaaaccattgttgacgggtcattttcagtgtttctgcttcgacagctgcccgtacgcgctcaattttaccactaccgataattggcagcggctggcttggtaaacgtaatacccaggcgtaaaccacctgttcaatgctgcccgcgtttaactcctctgccaccacagccagttcatcacgcagcggctggaaataatcatcattaaacagacgaccaccaccaaggcaggaccacgccatcggacgaacacgcagttgttgtagttggtcgagcgtgccatccagcagtaacggctgatgcaccggggatatttccacctgattagtggcaagggtaaacggcagacgactttgcaacagggcaaattgcgcaggcgtaaagttgcttacgccaaaatgacgcactttgccgctctgatgcagatgtttgaacgcgtccgccacttcatcggcatccattaacgggtctggtcggtggattaacagcaaatccagatgatcggtcgcgagattaattaggctctgttcggcgctcttaatgatgtgatcgcggtcagtgatgtaatgaccaatgacgttttcttcacgcgcggtcgtcgcgataccgcatttactgacgatttccatccgttcacgcaggtgaggtgccagtttcagtgcctcgccaaacgccgcttcgcactgatagccaccataaatatcagcatggtccacggtggtcacgccgagatccagatgctcttcaataaaactgaccagctggcgggcggacatattccagtccatcaatcgccagtagcccatcacaaaacgggaaaactccgggccttgcggcgcaatagtaatacgctgaaccataatcgcttcctcttatcagatatgagaggagtatacgcaagattaggttcaaaagagacttggttgctccggttcgtcactactcgctggcttatttgcgcgtaatttgcgcattaatcgctgccgacaaaggcgcagcacctcttgtttttcgccatcgctcattttattccagttaaaacgctcatcacgactacgaaaacagccgcgacaaaacccgcgttcgtcagactggcaaattccccggcacgggctctggacgggaaagaactctaattgctccgccacttcgccctcctcagataagattattaccattattgaagctgttaatgtccaaagtagcaactttgcttgcactagaccgactggtctactacactccaacgcatgaacaaacacaccgaacatgatactcgcgaacatctcctggcgacgggcgagcaactttgcctgcaacgtggattcaccgggatggggctaagcgaattactaaaaaccgctgaagtgccgaaagggtccttctatcactactttcgctctaaagaagcgtttggcgttgccatgcttgagcgtcattacgccgcatatcaccagcgactgactgagttgctgcaatccggcgaaggtaactaccgcgaccgcatactggcttattaccagcaaacactgaaccagttttgccaacatggaaccatcagtggttgcctgacagtaaaactctctgccgaagtgtgcgatctgagtgaagatatgcgcagcgcgatggataaaggtgctcgcggcgtgatcgccctgctctctcaggcgctggaaaatggccgtgagaaccattgtttaaccttttgtggcgaaccgctgcaacaggcacaagtgctttacgcactgtggcttggcgcgaatctgcaggccaaaattagccgcagtttcgagccactggaaaacgcgctggcccatgtaaaaaacattattgcgacgcctgccgtttaacaggcattttttatcaccagacgaccgggagcctttatgagttctgaaaaactgtattccccactgaaagtgggcgcgatcacggcggcaaaccgtatttttatggcaccgctgacgcgtctgcgcagtattgaaccgggtgacattcctaccccgttgatggcggaatactatcgccaacgtgccagtgccggtttgattattagtgaagccacgcaaatttctgcccaggcaaaaggatatgcaggtgcgcctggcatccatagtccggagcaaattgccgcatggaaaaaaatcaccgctggcgttcatgctgaaaatggtcatatggccgtgcagctgtggcacaccggacgcatttctcacgccagcctgcaacctggcggtcaggcaccggtagcgcctagtgcacttagcgcgggaacacgtacttctctgcgcgatgaaaatggtcaggcgatccgtgttgaaacatccatgccgcgtgcgcttgaactggaagagattccaggtatcgtcaatgatttccgtcaggccattgctaacgcgcgtgaagccggttttgatctggtagagctccactctgctcacggttatttgctgcatcagttcctttctccttctagtaaccatcgtaccgatcagtacggcggcagcgtggaaaatcgcgcacgtttggtactggaagtggtcgatgccgggattgaagaatggggtgccgatcgcattggcattcgcgttagtccaatcggtactttccagaacacagataacggcccgaatgaagaagccgatgcactgtatctgattgaacaactgggtaaacgcggcattgcttatctgcatatgagtgaaccagattgggcggggggtgaaccgtatactgatgcgttccgcgaaaaagtacgcgcccgtttccacggtccgattatcggcgcaggtgcatacacagtagaaaaagctgaaacgctgatcggcaaagggttaattgatgcggtggcatttggtcgtgactggattgcgaacccggatctggtcgcccgcttgcagcgcaaagctgagcttaacccacagcgtgccgaaagtttctacggtggcggcgcggaaggctataccgattacccgacgttgtaatccaacattgcgagcggcgtaaagccgccgctatactaaaacaacattttgaatctgttagccattttgaggataaaaagatgcgtcttcttcataccatgctgcgcgttggcgatttgcaacgctccatcgatttttataccaaagtgctgggcatgaaactgctgcgtaccagcgaaaacccggaatacaaatacagtctggcgtttgttggctacggcccggaaaccgaagaagcggtgattgaactgacctacaactggggcgtggataaatacgaactcggcactgcttatggtcacatcgcgcttagcgtagataacgccgctgaagcgtgcgaaaaaatccgtcaaaacgggggtaacgtgacccgtgaagcgggtccggtaaaaggcggtactacggttatcgcgtttgtggaagatccggacggttacaaaattgagttaatcgaagagaaagacgccggtcgcggtctgggcaactaatctcctgccgggcgtgaactcatcgcgcccgcatctttactgcatcgacaagtaatatttgtcataatgcgcgctgcaatttatccgtattaagagaatcagatgtccgataacgctcaacttaccggtctgtgcgaccgttttcgtggtttttatcctgttgtgatcgatgttgaaacagccggatttaacgccaaaaccgatgcgctgcttgagattgccgccatcaccctgaaaatggatgaacaaggctggctgatgccggacaccacattacatttccacgtcgaaccatttgtcggcgcaaatttgcaaccagaagccctcgccttcaacggcattgacccgaacgatcccgatcgcggcgcggtcagcgaatacgaggcgctgcacgaaatttttaaagttgtacgtaaaggtattaaagcgagcggctgtaaccgcgccattatggtggcgcacaatgccaattttgatcacagctttatgatggccgccgcagaacgcgccagtctgaaacgtaacccgttccaccctttcgccacttttgacactgctgcactggccgggctggcactcggacaaaccgtattgagtaaggcttgccagaccgctggcatggacttcgacagcacccaggcgcactccgcgctgtacgacaccgaacgcactgctgtgctgttttgtgaaatcgtcaaccgctggaaacgtctgggaggctggccgctatctgccgccgaagaggtgtaatcgagtcgatgcctgatgacatgcaatgattcaggcatctatagtgaggctattccacgcatcctgcatgatattcacggggaatagcgttaatggcagataatccagaccctagtagcctcctgccggacgtgtttagtccggcgacccgcgactggtttcttcgcgcctttaaacagccgaccgctgtccagccgcaaacctggcatgtggcggcgcgaagcgaacatgcgctggtgattgcaccgaccggctccgggaaaacgctggcagcatttctctacgccctcgatcggctcttccgcgaaggcggcgaagatacccgcgaggcgcataagcgtaaaaccagtcgcatcctctatattagtccgataaaagccctgggcaccgacgttcagcgcaacttgcagatcccgttgaagggtattgccgatgaacggcggcggcgcggcgaaacggaagtcaatcttcgcgtagggatccgtactggcgatacgcctgcacaggaacgcagcaaactcacccgtaatccgccggatattctgatcaccacacccgaaagtctctatctgatgctgacctcccgcgcgcgcgaaacgctacgcggcgtcgaaacggtaattattgatgaagtccacgcggtagcgggcagtaaacgtggtgcgcatctggcgttaagtctggagcggctcgatgcgctgctccacaccagtgcacagcgaattggcctttctgccactgtgcgcagtgccagcgatgtggcagcatttcttggtggcgatcgcccggttacggtagtcaacccgcccgcaatgcgccatccgcagatacgaattgtcgtaccggtcgccaatatggatgatgtcagtagcgtcgccagcggcaccggcgaagacagccatgccggccgggaaggctccatctggccatatattgaaacgggtatccttgatgaagtgttgcgccatcgcagcaccattgtctttactaatagccgggggctggcggaaaaactgacggcacgattaaatgagctttacgccgcacgcttacagcgttccccgtctatcgccgttgatgcggcccatttcgagagcacctccggcgcaacctctaaccgtgtacaaagtagcgacgtttttattgcccgcagtcaccacggctccgtctctaaagaacaacgagcaatcaccgaacaggcgctgaaaagcggtgaattacgctgcgtggtcgcaacctccagtcttgaactggggattgatatgggcgcggtggatctggtgattcaggtggcaacgccgctttctgttgccagtgggttacaacgcattggtcgcgccggacatcaggttggcggtgtatctaaagggctgtttttcccccgtacccggcgtgatttagtcgattccgcagtcattgtagagtgtatgttcgcaggcaggctggaaaacctgacaccaccgcataatcctctcgacgtccttgcgcagcaaaccgttgccgccgcggcgatggatgcattacaggtagacgaatggtactcccgcgtacgccgtgccgcaccgtggaaagatctgccaagacgtgtttttgacgccacgctggatatgctttccgggcgctatccctctggcgatttttctgcttttcgccccaaactggtctggaacagggagaccgggatattgaccgcccgacctggcgctcaattgttggcggttaccagcggcggcaccattccggatcgtggcatgtatagcgtgttattacccgaaggtgaagaaaaggccggtagccggcgggtgggtgaactggatgaggagatggtatatgagagccgggtgaacgacattatcactctcggcgctaccagttggcggatccagcaaatcacccgcgatcaggtgattgtgactcctgctccgggtcgttctgcccggctccccttctggcgtggtgaaggtaacggacgtccggctgaattaggcgagatgatcggcgattttcttcatttgctggcggatggcgcgttcttttccgggactattcccccgtggctggcagaagaaaatacgatcgccaatattcaggggttgattgaggagcagcgcaacgcgacgggcatcgttccggggagtcgccatctggtcctcgaacggtgccgtgatgaaattggtgactggcgtattattttgcactctccctatggaagacgggtgcatgaaccctgggcggtggcgattgccgggcgaatacatgcgctatggggcgctgacgcgagcgtggtcgccagtgatgacggcattgttgcacgtattcctgacaccgatggtaaattgcccgatgccgcgatttttttgtttgaaccagaaaagttgctgcaaattgtccgcgaggcggtaggcagcagcgcacttttcgccgcccgttttcgcgaatgcgccgcgcgggcattattaatgccggggcgcactccgggccatcgcaccccgctttggcaacaacggctgcgcgccagtcagttgctggaaatcgctcagggatatccggattttccggtcattctcgaaaccctacgcgaatgtctgcaagatgtttatgatcttcccgcactggaacgtttgatgcgtcgcctgaacggtggcgaaattcaaatatccgatgtaacgaccactacgcccagccctttcgccacaagtttattgttcggctatgtcgcggaatttatgtaccagagcgacgccccgctggcagagcgccgggcatccgtactgagcctggacagcgagttactgcgcaatctactcggacaggtcgatccgggggaattactcgacccgcaggtcattcgccaggtggaagaagagttgcaacgactggctcctggcagaagagcgaaaggtgaagaaggattgttcgacctgctgcgcgaactggggccaatgaccgttgaagacctggcgcaacggcatacaggcagcagtgaagaggttgcgagctatctggaaaatcttcttgcagtaaaacgaatcttcccagcgatgattagcggacaggagcgtcttgcctgtatggatgatgccgccaggctgcgtgatgccctcggcgtacgactaccagagagtttgccagagatttatttacatagagtcagttacccgcttcgcgacctctttctgcgctatctccgggctcatgctctggtcacggctgaacaactggctcatgagtttagtctcggtattgccattgtcgaagagcagcttcagcaactgcgtgaacagggtctggtgatgaatctgcaacaagacatctgggtgagcgatgaagtatttcgtcgtctgcgtttgcgcagcctgcaagccgccagagaagcgacgcgtcccgttgcagccacgacctatgcgcgattgctgctggaacgtcagggcgtattacccgccaccgatggtagcccggcgctctttgccagtacaagcccaggcgtttatgagggcgtagatggcgtgatgcgggtgatcgaacagcttgccggagtcggtttacccgccagtctctgggaaagccagatcctgcctgcccgcgtacgcgactatagcagtgaaatgctcgatgaattactggcaaccggtgcggttatctggagcgggcaaaaaaaactgggtgaagatgacggcctggtggcactgcatctacaggaatatgctgcagaaagcttcactcccgccgaagcggatcaggcgaatcgtagcgcgctgcaacaagcgatagtcgctgttctggctgacggaggagcctggtttgcacaacaaatcagccaacggatacgcgacaaaatcggcgaaagcgttgatctctctgccctgcaagaggcgttatgggcgctggtctggcaaggcgtcatcaccagcgacatttgggcaccgttacgcgccctcacccgcagcagttccaacgcacgcaccagtactcgccgcagtcaccgggctcgtcgtggacgtcctgtctatgcgcaacccgtcagcccgcgggtatcttacaacacaccaaatctggctggacgctggagcttattgcaggtggagccactaaacgataccgaaaggatgctggcgctggcggaaaatatgctcgaccgctacggcatcatcagtcgtcaggcggtgatagccgaaaatatccctggcgggtttccaagcatgcaaacgctttgtcgaagtatggaagactccgggcgaattatgcgaggtcgttttgtagaaggtctgggtggcgcgcaattcgctgaacgtctgactattgaccgattgcgcgatctggcgacacaagccacgcaaacgcgccactatacaccagtggcgctctctgccaacgatccggctaatgtgtggggaaatcttctgccctggcctgcacatccggcaacgctggttccaacgcgtcgggcgggtgcgctggtggtcgtttctggcggcaaattgttactctatctggcgcaaggtggcaaaaaaatgctggtctggcaggaaaaagaggaattactcgccccagaggttttccacgcgctgactaccgcactgcgtcgcgaaccacggctgcgctttacgctaacagaagtgaatgatctaccggtccggcaaacgccgatgtttacgctgctgcgtgaggcgggatttagtagtagcccacaagggctggattggggataaagaaaggactgacggatgcccgttcgcatccgtcagtattgcaggacggattattccgcgtccggctcttcagacttgtatttagcggcagtttctttgatcagctgctgcagttcgccacgctgatacatttcgatcacgatatcacaaccgccgaccagctcgccgtcaacccacagttgcgggaaggtcggccagttagcatatttcggcagttccgcacgaatgtccggattctgcagaatatcaacataggcaaaacgttcgccacatgcggcaagcgcctggactgcctgggcagagaaaccgcagctcggcagtttcggactacctttcatgtacagcaggatcgggttttcagcaatctggcgttggattttttcgatagtggtgctcattgtcttgcttcctcaaacttctttacggcagtaatctgacattgtagcgggtcagtgcggcatcggaaaataacattttcatcacgcttttgctattttatccctttgctctatttgttgcatttcaaatattcgtttcttctctgatgccggcaaactggcgtatttataaccatttttagctttcactgctgcatttttttgcgctcgccaacgaaacgtattttttaacaataaaagctattaactttctcttcttctatgcattagaatcatcaagttttgtaaatcagacgcaggcatgatagacctgcctttacagagggacgctcagtggcgcggataaaccgtattagcatcacgctctgtgctttactttttaccaccctgcctttaacgcctatggcccatgctagtaagcaagccagggagagttctgctaccactcatatcaccaaaaaagcagataaaaagaaaagcacggcaaccaccaaaaagacccagaaaacagcgaaaaaagccgccagtaaaagtacgaccaaaagcaaaaccgcttcttccgttaaaaaatcttccattaccgcttctaaaaacgccaaaactcgcagcaaacacgccgtcaataaaacggccagtgccagctttaccgaaaagtgtaccaaacgtaagggctataaaagccattgtgtgaaagtcaaaaatgccgcgagtggaactcttgccgacgcgcacaaagcgaaggtgcaaaaagctacgaaagtggcaatgaataaactgatgcagcaaattggtaagccatatcgttggggtggcagcagtccgcgtaccggttttgattgcagcggcctggtttattacgcttataaagatttggtgaaaattcgtattccgcgtacggcgaatgaaatgtatcacctgcgtgatgcagcgccaatcgaacgtagtgaactgaaaaacggcgacctggtctttttccgtactcagggacgcggcacagccgatcatgtcggcgtgtatgtcggcaacggcaaatttattcagagtccgcgcacaggtcaggaaattcaaatcacttctctcagtgaagactactggcagcgccactatgttggcgctcgtcgggtaatgaccccaaaaacacttcgctaaaactttaccctgttgttacggcaacagggtaagttcatcttttgtctcaccttttaatttgctaccctatccatacgcacaataaggctattgtacgtatgcaaattaataataaaggagagtagcaatgagtttcgaattacctgcactaccatatgctaaagatgctctggcaccgcacatttctgcggaaaccatcgagtatcactacggcaagcaccatcagacttatgtcactaacctgaacaacctgattaaaggtaccgcgtttgaaggtaaaagtctggaagagattattcgcagctctgaaggtggcgtattcaacaacgcagctcaggtctggaaccatactttctactggaactgcctggcaccgaacgccggtggcgaaccgactggaaaagtcgctgaagctatcgccgcatcttttggcagctttgccgatttcaaagcgcagtttactgatgcagcgatcaaaaactttggttctggctggacctggctggtgaaaaacagcgatggcaaactggctatcgttagtacctctaacgcgggtactccgctgaccaccgatgcgactccgctgctgaccgttgatgtctgggaacacgcttattacatcgactatcgcaatgcacgtcctggctatctggagcacttctgggcgctggtgaactgggaattcgtagcgaaaaatctcgctgcataataactgatggcaaatgcagcattgcctgaagcgctacgcttatcaggcctacgcggatcatcgatgtaggtcggataaggcactcgccgcatccggcaagataaatcgcacgttgtcagcaactgtaacgcagaaggttatccttctgcgtttttgtttaattagctgttagcaacgcaaactgtttcaggttgttttctggcactcataaacaccagcaataatgccagtcccgcgacaatcgctcccatcaccggcacaaagctgtatcccagcccagcggaaattaccgcaccaccagcagctgctcccagcgcatttccaagattaaaggcaccaatattgacactactagacagacctggcgcttcactggcgacacgcatcacgcgcatctgtaacggcggtacgaccgcaaaggttgctgcgccccacaccaccatgctaatagctgcgccgaactcattgcgggccaggaacgggattgccagcataatcaccatcaacaacaacaaaaagcctttcaacgtgccgttaacactacgatctgccagtttgccgccgagatagttaccgatagagaatccgacaccaatcagcaccagcattgccgtgacgaacaccggtgttgcgtgggtaatactttgcagtaccggagagatataggtgtagagagtaaacattgcaccagctcccagtaccgtcgtcagcaatgcagacagcacctgcggacgcattaataccgccagctcttttttcacttcaggtcgtgcccctgcaccacctttaggtaaactgaagaacagacttaccatactaatcactcccagccccgccgttgccagaaaactcatccgccagccgatggtttcacccaaccaggtcgccgccggcacgccaccgatatttgccagggttaaccccataaacatagtggcaactgcgctggcctgtttatgttttggcaccacgcttgcggccacgacactacccaaaccaaaaaatgctccgtgattcaggctggtcaaaatgcgactaagcatcagggtcatataatccggcgcgatggcggaaagtacgttgccgagcgtgaaaattgccatcaggaaaatcaacgcactgcggcgggcacgatgagaaagtagaagcgtcatcagcggcgcgccaaccattacgccaactgcataggcactgattaacattccggcagcgggaatgctgacatccacaccgcgcgcaatgacgggcaacaagcccattgggctgaactccgttgtcccgataccaaacgcgccaatcgccagcgccagcaacggatagttaattttcatgccttatctccacctcttcgcgtcattacgcgatattcattaaagtggcgaaagcatgacagcaatcacaaaaaaatgaaaataacaaaaagagaaaacacttttgccattttgctaacaaacaggaaggagatgcgagggagaacgcgctccctcgagaggaaatcagtgcagcgcggcagtcaaacccacggctacgatcaaaccgaggacgataatcgttgttaccagtgaaaatttaaggtcggtgctcatcaagttttctccttttttattaccacacaaaaagtgatattacgcatttttacacactgtgatgaaaaaatctcccgtcatttataatgataagtgtttttaccacttccccttttcgtcaagatcggccaaaattccacgcttacactatttgcgtactggccattgaccccttcctgacgctccgtgtcgtttttccggcgtaccgcaacacttttgttgtgcgtaaggtgtgtaaaggcaaacgtttaccttgcgattttgcaggagctgaagttagggtctggagtgaaatggaatggcaacaataaaagatgtagcgaaacgagcaaacgtttccactacaactgtgagtcacgtgatcaacaaaacacgtttcgtcgctgaagaaacgcgcaacgccgtgtgggcagcgattaaagaattacactactcccctagcgcggtggcgcgtagcctgaaggttaaccacaccaagtctatcggtttgctggcgaccagcagcgaagcggcctattttgccgagatcattgaagcagttgaaaaaaattgcttccagaaaggttacaccctgattctgggcaatgcgtggaacaatcttgagaaacagcgggcttatctgagcatgatggcgcaaaaacgcgtcgatggtctgctggtgatgtgttctgagtacccagagccgttgctggcgatgctggaagagtatcgccatatcccaatggtggtcatggactggggtgaagcaaaagctgacttcaccgatgcggtcattgataacgcgttcgaaggcggctacatggccgggcgttatctgattgaacgcggtcaccgcgaaatcggcgtcatccccggcccgctggaacgtaacaccggcgcaggccgccttgccggttttatgaaggcgatggaagaagcgatgatcaaggtgccggaaagctggattgtgcagggtgactttgaacctgaatccggttatcgcgccatgcagcaaatcctgagccagccgcatcgccctactgccgtcttctgtggtggcgatatcatggcaatgggcgcactttgtgctgctgatgaaatgggcctgcgcgtcccgcaggatgttagcctgatcggttatgataacgtgcgcaacgcgcgctattttacgccggcgctgaccacgatccatcagccaaaagatagcctgggtgaaacagcgttcaacatgctgttggatcgtatcgtcaacaaacgtgaagaaccgcagtctattgaagtgcatccgcgcttgattgaacgccgctccgtggctgacggcccgttccgcgactatcgtcgttaatcacccgttgcgggagtctcttccggctcccgcagccactccttattcagcgtctcactatcgccgagatactcaagcaaccaggttaacgcagggctcatatcattttgctgccatgtcagacaacatgcgctatccggaaaggggttttccagttctaatgctacccacttcccctcattaagccacggtttggcgaaatgtgttggcaccatccctatgcataatcctgcgctgatacaggttgcgctactttcccagtcaggcacgacaactcttttttggttatccagcaaccaggtaatacgtttaggtagcgttcggctggtgtcttcgcgcaccaagctcggccagttgcgcaacgtatcatcgctgaacgggccatccatcaacgccagcgggtggtgactggcaacaacgcaactccagcttagcatccccatatcccggaaggcataacgaccgcctaccggaatcgcgcgtgttgcgccaatcgccagttccacgcgcccgtcggaaagcgcatcccagacaccgttgaacacttcctgaaagacaagaagttcgacatcatcaaaatggcgataaaaatcaacgatcatctgccgtgtacgttctggcctgacaatattatccactgcgatagctaactgaccgcgccagccgttcgctatctgctgacattgctggcgggtgatctgcatttttttgacaacagagcgcccttctttgagaaaccacgctccagcagcggtcagctccacatcacggtgccgtcgttcaaagagcggcaccgccagccactcttccagctgacgcacggtatagctgaccgcagaaggaacgcgatgcagctcctgtgccgcagcgctaaaactaccattacgcgctaccgcatcaacaacttcgagactatattcactccacatagtctgcctgcaaaatttttgaaaccagtcatcaaatattaccgtttcacaacactaatttcactccctacactttgcggcggtgtttaattgagagatttagagaatatacatgcaacctgggaaaagatttttagtctggctggcgggtttgagcgtactcggttttctggcaaccgatatgtatctgcctgctttcgccgccatacaggccgacctgcaaacgcctgcgtctgctgtcagtgccagccttagtctgttccttgccggttttgccgcagcccagcttctgtgggggccgctctccgaccgttatggtcgtaaaccggtattattaatcggcctgacaatttttgcgttaggtagtctggggatgctgtgggtagaaaacgccgctacgctgctggtattgcgttttgtacaggctgtgggtgtctgcgccgcggcggttatctggcaagcattagtgacagattattatcctagtcagaaagttaaccgtatttttgcggccatcatgccgctggtgggtctatctccggcactggctcctctgttaggaagctggctgctggtccatttttcctggcaggcgattttcgccaccctgtttgccattaccgtggtgctgattctgcctattttctggctcaaacccacgacgaaggcccgtaacaatagtcaggatggtctgacctttaccgacctgctacgttctaaaacctatcgcggcaacgtgctgatatacgcagcctgtagtgccagtttttttgcatggctgaccggtagtccgttcatccttagtgaaatgggctacagcccggcagttattggtttaagttatgtcccgcaaactatcgcgtttctgattggtggttatggctgtcgcgccgcgctgcagaaatggcaaggcaagcagttattaccgtggttgctggtgctgtttgctgtcagcgtcattgcgacctgggctgcgggcttcattagccatgtgagcctggtcgaaatcctgatcccattctgtgtgatggcgattgccaatggcgcgatctaccctattgttgtcgcccaggcgctgcgtcccttcccacacgcaactggtcgcgccgcagcgttgcagaacactcttcaactgggtctgtgcttcctcgcaagtctggtagtttcctggctgatcagtatcagcacgccattgctcaccaccaccagcgtgatgttaagtacagtagtgctggtcgcgctgggttacatgatgcaacgttgtgaagaagttggctgccagaatcatggcaatgccgaagtcgctcatagcgaaagtcactgatctatatcgatatacttatacttaggctgctaacaaaattttgttgtatgattgaaattagcggcctatactaatttcgagttgttaaagctacgataaatattatgtttttacggggacaggatcgttcccgactcactatggatagtcatttcggcaagggttcctcctttccctctgttctacgtcggattatagactcgcggttttttctgcgagatttctcacaaagcccaaaaagcgtctacgctgttttaaggttctgatcaccgaccagtgatggagaaactatgagtagtagctgtatagaagaagtcagtgtaccggatgacaactggtaccgtatcgccaacgaattacttagccgtgccggtatagccattaacggttctgccccggcggatattcgtgtgaaaaaccccgatttttttaaacgcgttctgcaagaaggctctttggggttaggcgaaagttatatggatggctggtgggaatgtgaccgactggatatgttttttagcaaagtcttacgcgcaggtctcgagaaccaactcccccatcatttcaaagacacgctgcgtattgccggcgctcgtctcttcaatctgcagagtaaaaaacgtgcctggatagtcggcaaagagcattacgatttgggtaatgacttgttcagccgcatgcttgatcccttcatgcaatattcctgcgcttactggaaagatgccgataatctggaatctgcccagcaggcgaagctcaaaatgatttgtgaaaaattgcagttaaaaccagggatgcgcgtactggatattggctgcggctggggcggactggcacactacatggcatctaattatgacgtaagcgtggtgggcgtcaccatttctgccgaacagcaaaaaatggctcaggaacgctgtgaaggcctggatgtcaccattttgctgcaagattatcgtgacctgaacgaccagtttgatcgtattgtttctgtggggatgttcgagcacgtcggaccgaaaaattacgatacctattttgcggtggtggatcgtaatttgaaaccggaaggcatattcctgctccatactatcggtagcaaaaaaaccgatctgaatgttgatccctggattaataaatatatttttccgaacggttgcctgccctctgtacgccagattgctcagtccagcgaaccccactttgtgatggaagactggcataacttcggtgctgattacgatactacgttgatggcgtggtatgaacgattcctcgccgcatggccagaaattgcggataactatagtgaacgctttaaacgaatgtttacctattatctgaatgcctgtgcaggtgctttccgcgcccgtgatattcagctctggcaggtcgtgttcagtcgcggtgttgaaaacggccttcgagtggctcgctaaaggctattctatcgccccctctccgggggcgatttcagatcaggcttctgtgcctggttgattcatggcattttctcgtgccgccagcacacgttctaccgtatctaccactgcctgagtttgtggatcgatttcaatgttgacgcgtgcgccaagttttttcttcccaagagtcgtgcgttccagtgtttcccgaattaaatggacgcaaaaacgcgttggcgtgacttcgccgacggtcaggctaataccgtcgatgccaataaatcctttgtacagaatatatttcatcaactgactatcctggactttaaaccagatctggcgattattttcactggttaatattttcgccacttcagcagtggtcataatatgaccactcattaagtgtccgccaatttcatcactgaatttcgccgcacgctcaacgtttacccaatcccccacttttaaatcgccaagattggtaatgcgtaacgtttctttcatcaggtcaaaactgacatggttgccgttaatttccgtcacggtcaggcagcaaccgttatgcgccacggaagcaccggtttccaggccgtccagcatgtggtcgggtaactccaccacatgcgtacgaaaatttggtttctcgtcaatgctcaccagttttgcggtgccctgtacaatccccgtaaacatacttacaactcctgaaatcagttaagacattctgttcagcacaatagcaggtggaaaacgcccttaccagtgaaggggtaagaatggctattttttcactggagaattaataaatcctcgctacaatagactgaatttcccctgcttcttctttttgctgcccattcaggcggctttttagtctctcatataactacaaataaaaggtgttcacgtgcagaagtatatcagtgaagcgcgtctgttattagcattagcaatcccggtgattctcgcgcaaatcgcccaaactgcgatgggttttgtcgataccgtgatggcgggcggctatagtgccaccgacatggcggcggtcgctatcggtacttctatctggcttccggcgatcctctttggtcacggactgctgctggcattaacgccggttatcgcgcaattaaatggttccggtcgacgtgagcgcattgcgcatcaggtgcgacaaggtttctggctggcaggttttgtttccgttctcattatgctggtgctgtggaatgcaggttacattatccgctccatggaaaacatcgatccggctctggcggacaaagccgtgggttatctgcgtgcgttgttgtggggcgcgccgggatatctgttcttccaggttgcccgtaaccagtgtgaaggtctggcaaaaaccaagccgggtatggtaatgggctttatcggcctgctggtgaacatcccggtgaactatatctttatttatggtcatttcggtatgcctgagctcggtggcgttggttgtggcgtggctactgcggcggtgtattgggtcatgttccttgccatggtttcttacattaaacgcgcccgctccatgcgcgatattcgtaacgaaaaaggcaccgcaaaacccgatcctgcggttatgaaacgactgattcaactcggtttgccgattgcgctggcactgttctttgaagtgacactgtttgccgtcgtggctctgttagtgtctccgctcggtattgttgatgtcgcaggacaccagattgccctgaactttagtagtctaatgttcgtgcttccaatgagcctggcggcagcggtaactatccgcgtaggttatcgtctgggtcagggcagtacgctggatgcgcaaaccgctgcgcggaccgggcttatggtgggtgtctgtatggcaaccctgacggccattttcacggttagtctgcgggagcaaatcgccctgttgtacaacgacaatcccgaggttgtaacgctggctgcgcatttgatgttgctggcggcggtatatcagatttctgacagtatccaggtgattggcagtgggattttgcgtggttataaagatacgcgttccattttctatattacctttacggcttactgggtgctgggcttgccaagcggctatattctggcactgaccgatctggtcgttgaacctatggggccagcaggcttctggataggctttattattggcctgacgagcgcagccattatgatgatgttgcgtatgcggttcctgcaacgtctgccgagtgccatcattctgcaacgagcatcccgctaataaagacaaggcgcaaccttcacgggttgcgcctgtatttttacgcaggctggagcgttgcgccaatcccgtcttcgtctggctgtaatttcagagcgttacacagagtttgccgactggcatctgttatctcaacgtgtatatccccggtaacttcccctttcacattgatgaagtcaggactaatttcttttgcactggtttgcaggcaaatcgctccctctccgcgcaggcgtttcactttcagttgcacatgcgttgccgcatcagtgatcagccacagttttccaccattcagattgatgttaccaacaatgaaagtgacactgtcaccttttaccgtactgccgtctagaatcaacacaccgccctgctgtacagtaatcgtactttgttgcagctctgcgccataaccaataatcatactagcgccgtccagtaatgcaacactcccggtcagttcaaccggtgcgcgatcttcctctacgacaaaattttcgtccgcgctggtgggactcaacaggatcactgtcccaccttgtattaccgcgttttccagcgtaccggcatgcacttcagcccgaccacccacattcacggacaggttttgcgtcttaccggaactgtagagctgaaggccatccgtccccagacgataaatggatccattctcaacaatagtgtcagagtcttcaccaccgagattattcatggtgccaccagcaagcaacgtatcactggctttcccggccagcataaaaacgccgccctgattaatctcacaattgctggcttccccacctggatacaccaacaattcaccaccttcatctaccacgaccgcactggttgtcccattaaccaacaggccgccctcttgatcgagaatgattttttccgcgcgatgtccttccagtacacgcaggttaccgccattttccagcaacaaaccgcaggcataacctttatcaacgctgaattcaccttcgggatggcggccattaaccgtagcgagcgtagagagactaattgcgcctccctcggactgaacaatatctgtggcaatggcaccatcgctgacgcttagcgtgccattgttaccgtactgtgtgcatttggcgatcccaccggttgccactttcaaccagccagcccccgtgaccacggtattttcggctcttccgccagcttcaacaatcaactcgccttcagtaagttgcgtcgcgccaatgacctcgccggtcttaacaatttgcacgttcccgtcgctcatcaagtttttcgcatcagatcccatgatttattcctttgctgcatctgtgtgcctttattgctacctaagtgtaaaggctacggaggatttatccacgacagatttgagatggtggcaaacaactctgtttaaactctgatacacgaattattgggttgtatcagatgtaaatgcgatcctgaataaaaatcacccttgcaaatcaacaaaatatagccaatttgcttaaaagctctgcaaacggtcgaaatagcgcagaaaattacgttttgcctcttgccaccttcccactctgccgctaatattcgtccccgttgtcacctacaacgttgcgttcatagctcagttggttagagcaccaccttgacatggtgggggtcgttggttcgagtccaattgaacgcaccatcctgcgtccgtagctcagttggttagagcaccaccttgacatggtgggggtcggtggttcgagtccactcggacgcaccagattttcttaatctggtcttctcctttttccctctgtttcttctctgtatccaatacgttaaaagatttacactgtcttcgtatgcgttatcagaaggagaatcgctatggcaactttgttacaacttcattttgcttttaatggcccatttggcgacgcaatggctgagcagcttaaaccacttgctgagagcattaatcaggaacctggttttctgtggaaggtatggacagaaagtgaaaagaaccacgaagccggtgggatctaccttttcactgatgaaaaaagcgcccttgcctatctggaaaaacatactgcccgactgaaaaatctcggcgttgaggaagttgtcgccaaagttttcgatgtcaatgagccacttagtcaaatcaatcaggcaaaactcgcctgacagaatttaatcaagggcggttagcgcccttttcatccctgtctgaaatttctcaaattctaaaaatctcaaccaaacttatctgataacactaaattcgaaagaatgcgtacaggtaagtaacaatgaaaaaaattgctattgtgggtgccgggcctacggggatctacaccttattcagccttctacagcaacaaactccactttctatttctatcttcgagcaggctgacgaggccggtgtcgggatgccatacagtgatgaggaaaacagtaaaatgatgctggcaaatattgccagtattgaaataccgccgatttattgtacgtatctcgaatggctacaaaagcaagaagacagccatctccagcgttatggcgttaaaaaagaaaccttgcacgatcgtcagtttttaccgcgaattctgctgggcgaatatttccgcgatcaatttttacgactagtagaccaggcacgacagcaaaaatttgcagtggctgtttatgaaagttgccaggttaccgatctgcaaattacaaatgctggcgtcatgctcgctacaaatcaggatttacccagcgagacgtttgatttagcggtgatcgccacgggtcacgtctggcctgatgaagaagaagcaacccgaacgtattttcccagcccgtggagtggcctgatggaagcaaaggtcgatgcgtgtaacgtgggtattatgggaacatccttgagcggactggatgcggcaatggcagtggctattcagcatggtagcttcattgaagatgataaacaacacgtcgtttttcaccgcgataacgcaagtgaaaagctaaatatcacgttgttgagccgcacgggtattttacccgaagccgatttctattgccctattccctacgagcccttacacatcgtcaccgatcaggcattaaatgctgagattcaaaaaggcgaagagggccttttggatcgggtatttagattgatagtagaggaaatcaagtttgctgatccagactggagtcaacgcatagccttagagagcctgaatgtcgattcctttgctcaagcctggtttgccgagcgcaaacaacgcgacccatttgactgggcagaaaaaaatctccaggaagtcgaacgcaataaacgagaaaaacatactgttccctggcgttatgtcattctgcgcctgcatgaagccgtacaggaaattgttccacatctgaatgaacacgaccataaacggttcagtaaaggccttgcccgggttttcatcgataattatgcggcaatccctagtgagtctattcgtcgcctacttgccttacgtgaagcgggaatcattcatattctcgccctcggtgaagactacaaaatggaaattaatgagagccgcaccgtcctgaaaacggaagacaacagctacagctttgacgtttttattgatgcccgcggacaacgtccgcttaaagtgaaagatatccctttccctgggctacgcgagcaattacagaaaacaggggatgaaatccctgatgttggcgaagattatacgttacagcaacccgaagatattcgtgggcgcgtagcgttcggcgcgttgccctggttgatgcacgaccagcctttcgttcagggacttacggcatgtgcagaaattggtgaggcgatggctcgggcggtcgtaaagcctgcatcccgtgctcgtcggcgtcttagctttgattaaaggtaaagctatcagcactcaacaaactgatgctgttcattaagacgatagcggactccggctcgaatattgttttcaccttcaatggcgacggcgaagcgaactctttcgccgtcatgatatgccagtgcggcgcttcctcctggcccgagaataatactgtcgaccacgcccgtgctcactaccgtactattttcaccgctggcaatgatgtgtacattgtcgccgctgttggcaattctggcgtttgcgccaaagctggcgatttgcaccaggtcaccattactggcgacatgacaccgttcacccaatgtacaaacgcgtactcgcattccggtattcgcaatccgactgctatctccagcgctgcttatccggctagaattaccggttacagcaacccgtgcgcgttcaccggagctgccaatgtgactgttaaagccgacacttccaatccgcacgctataacccatactggcaatttgcgcggcatacccagcggttgcgattctggcgttatcctcacaacagccgatgcgagcatgatcgtcgctgcgggcaaactgactgcaaaatggtctctctccggggtctgtggccagtttttgcatagaggaaacttcctgatgcgcgaagttttcatccgccagccattttttccacgcatactcaaccagactctccgcccagtccgtatatccttcctcaatcagtgcatgatgaatatcggcataactaccgccgcgtgggaaatggcgcaggaaccagcgatacatcaccgctccgatacgccattctcgcaggtctgcttgtgtaatgatcattcgttagtgccggtgatagccatcgaccatgcttttaaaggtttcgtgtggcgtacgccccgtggtgcaaagataaagatgaccgaagataaaaaagaggcttataaatgccagagcaaaatgtgtctgcaataaccagtatcttacgccaggaaacacatctcccacggcttgcggatagagacacagcagccccgtcaatagtaacaacggcagcaatccatacatgacaccaacataggcgacctgctgtaagggattaaatttagactgggttgttgccgggaaaggatgttcttccccctgcataatgccaaacaaataaaatcgcgtttgttttgccgctcgttccagccacccctgacgacgaatgcgatagtggtgaccattatccccaacggcattgatcagcacaaagccgagccagcatgccagtaacaaaaatccgcaaacttcatgcaccgcaaccagacttttaaccgcagttgcgcccaccatcgcaaagtgatttatcagcccactggccagcaacaatacaaagagtaacgcattgctccagtgccataatctgaccgctttgctgtaaagataaatcttctcaccatgatcggtggcacttttcttcacgccacgagcacgaagcaaggcatgcagccccagcaccaaccacatcccaaccagcaatactccggcaatgatcaaccacaccggccaaaattcgggagtgaactgtggcacatagttcgctaactggctctgaaactgttcagcatgttggctcgggttcatacattttcctttttaatcaaatgttgaccgaaccggcgatacagatgcggtttcccggcaccaggtagctgatattgatagtatttattttgctgcaaccacgcctgaatttctgggctatcttcgcgaccaaagatcaatgcgtgttccgggcaggcgctgacgcaaatgggcggaaagccttttgccagtcgggactcagcgcagaaatcacatttatctgccactttagtgacagggttaaggtagcgaacctggtacggacaagcgccaatgcaataactgcagccgatgcactggcttttttctacccgcacgatcccctgctcatcacgccagctcgcccccgtcgggcaaacgtcgatgcacggagcatcttcgcagtgctgacaactctggcgaaaaaagtgatactgcgtttcgttgtcgttatcggtgactggaatgtgtgctatgcttaaacggcttccctgagcggggacgtggttagttttacggcatgcgcgggcgcaaatattacagccattgcaccgactctcgtcatgaatcatggcataccgaacttccttttcttgcctcgtgttcgctaacagagaagacgcagaaccagtaaaaaagattactgttcccatccccagaacaaatttgcgtcgagtgaaggacatctgattatcccctaatgcagtggctgcaactgtccaccctatccatgacatctccctgaaatttcaggggttctgaaactgctctacctcgaaccattcgcataagccataagccttgccataggtcataaatcgctcgctaaacaagtacaacaccgccgtgctactctccacctgccgtatatcggcatattcaggtgcaacatccatcgcggcgatcgcggcttcaatctgcgcttcctggaagtaatatggcgcttgcatcagcatggcgactttgtaaggacgaggatacgtctggcactcaaaacgaacggcgtgtgcaatggcgcgacaaatgtcctgctccacaacttgcaaagacatcgccgcgtagttttcactcatggcctgcgtactgtaatagtaatcatccttgcttcccgtcaaacaagcgatatccgcgtagtctccgttctgcttaatgctttccagcaaaacactcagttcctcttctgcaaccaaatagggtgggctgagaaacacggcgcgcgccaccagctgcccagccgcagaatgctggcgaatgaactcagccaggatttcagcaggttctggttcggttaccgtatcaacggggtgacgcatcccctgcaaccattgccgcttcgcctcgtcaacttcgctgactttcgctaacggcaattcatcctgatggttcatcttacccattccttacgcaggcagtagattgtgtgctgccagatcggcggcaatatcttccagccccagacgctgcaatgtttcgcgggttggacaaccaagctgtgggtcccagcccatttctttgtagaacatcgtgaggctagcatgcatatcgtcacgatccattttgtcagtaccttcagtaaagaccgggatctgcggatccttgtcgaatacccaggaacagataagatcgtgttcattacgcatatctttggtttgcatcagttttaccgtgtaggcacgatgcaacgtaaaaatacgctctgcagctaaatctaatttttcctgagtcatctcttcgccggtgatcgctttgaagaatttggcttcaagcgccagatcgccccggtaattacggcttttcagcgggctaacggtcattggccagacccagttgcacagggtgacggcgttatgcaaacagacccgcaacaggctccactttgcatatttaatttttgcgtcattgattggcgtgtagtttttggtttcatcgtaagcatcttcagaaccaaaaagttctttcgccacttcacgttgcagtttcaatggcaagccggaaccaataaagttgatatgggtatgcgtcatgcagtcacggttgaacatacagttaacaatggaaccgacctgcgcactcgcttcattggcatggtgaaccggatagccaaacgggctccagagtttatttttcgcgtagccccagtactcttcacccaaattccagcgttctgcgatggcataactaccatcagccaggtgactcagctcacccacacgatgcgccagacggtagtaaaaatctttaatgaagttaacgtcacccgcttccagttgatcccagcgaatttctgcatactcttcagctggcagaacacgcttgaacacacctttgctgtaacaataagtaaagtcgcgatgcaactgcccgtagttacaccataggccgtagtcatcgaacaaattcagacccaccaggttaccaatcacacgaccatcgtctttatcttcaaaatctttcggcccgttcgggaagatggtggtatggacaaagtttgctacacaagtgttaccacctgtgctgggcacgccaaactctttcacccgaggaatattcatttgggtcatacaacggatcgggcaagagtggcagccgctcatttttactgtgtatttctctgccgccggtcctaagtcaaaaacggatttataggtacgaaagccgaccgtattctgattgcctggcggaatttcacccgtttcaatcggaccaccttcagccgcgccccaaaacagccctttacgtgctgtccagcgactcttgggatcactatactctgcccagctttgtggcgtacttggcacgacatggttgttattcgcaccaataagttcagtcatcatgtaatcattgagacgcttcatctcctgacgatcggcaatgttgacccctttcgtcccttcaaccgcaatcgctttcaggtttttgctacccattattgcgccagttcccgcaccgccgctgtggttacggctattcaacatgccagagagaggaacaaggttttccccagcctgaccaatagccgccacacaggtttccggactggtcaatcgacaaatttcttccgtcgttgcgcgcgtcccttttccccataagaaatcggctttttccaggctaactttgtcatctttaatcttcagccataccggacttttcgccttcccttcgataataatgacgtcgtatccagcgaatttcatttgcgctgcaaaaaagccacccatatgggcatcgacgactaaatttcctttggtaaaagtagaaagactggtgatatttacgcgagaactacagggggcaccagatccagttaatgggccggtagcaaagactaatttattcgcttcatcgaaaggtttcgtgcctggcggtacttcgtcatacataattttgtagccgaagcccatgccaccgacaaaacttttaaacttactggaatcttcgagggtaatatttcctgtcgtgagattgactcttaatatattacctgtccaaccgttagccatgattttttcctttgcaagattcacacagtaatatctttccactcgataatttttaacgcccctgttgggcaggcgtttgcgcattcaccgcataacacacatttgctggattttttactttcggtatttacggtggccatcatccacgggcatgccgtagtacaggcgctacagccaatacagcgtttatgatcgacggtaatacagccttctttctgctgccaggtaatcgcaccaatcgggcagacgttcatgcattgcggctctttgcattgacggcaggtgtccgcggtatagttgagatcgccatacaggccgccgccagagccaaccccgttgtcgccaaagaaataattgcgatggattttgatacgggagaagaatgtccctacactgccatcgttgaagttggtacaagagatttcacagcggtggcaacccgtgcatcgcgctcgctgggtcaccagcacccctttgggggtatttatcaaccctactgtgccgctatcaatatcttcctgtttgcaacccaaaagactcagtaacgcaggggcaattgttagaccagcaaggccttttccacttatacgcaagaattctaatcgcgttaagccaatatctaatagtggacgatcaaccgggttcatttatttcgcatcctcttcgcaaacacagtgctgacaattcagcagcctgatattaagcattcaactaatacgctgctgactctgtccccaacaccagatattttccctaacccgatagtgtatgagaaaagattaacgccgataaactaatcctttatggttaggagaaaaaataatgtgattattctgagcccttaacattgatcgttatcaattaaaattacaaagcaagaaattataagtgaactgatatttattatcatttgaaataaatttaacttaagcgacaattatttgtgactttcattgcagaaaataaaaataacattatcgctataaattaaaatacataccgaaattcgtataatttcagcagttgttatttagaatgattaactggaccgcaactgaagcaagaatatcaggatgaagcttaccgcctcatcctgaatggtcattttaccagtgcgttaatgacggtttccatcgcctgcttttccagctcactgcgctgaatgcgtttattggctaatgctgtacgtaatacgcctgcgataacaatatgctttggttcctgccccagatcgcgcatttccagcacaactttaccgacaactctgcacatttctcggtacagttcatcctcttttgtccgatttcccattctttatacctatttatcatgccaactatcagcatatatcaatctaaccaattaaacaaaaatcaaacaaaatcagacaaataacgcgataaattattttaactgtagcaattgagcgatgatatatttatacaccggatgaactttcacttatcctcacactgacaacttcggcaccagacgttgcgcaaacagtgaagtttttgcgtaaccttttccctggaacgttaaatctttgataacaatttattgtctaacaagttgtatattttttgaaacgctgtttttgttttccttttggattaatttcagcgtataatgcgcgccaattgactcttgaatggtttcagcactttggactgtagaactcaacgactcaaaaacaggcactcacgttgggctgagacacaagcacacattcctctgcacgctttttcgatgtcacctatccttagagcgaggcaccaccactttcgtaataccggattcgctttccggcagtgcgcccagaaagcaagtttctcccatccttctcaacttaaagactaagactgtcatgaaaaagaccaaaattgtttgcaccatcggaccgaaaaccgaatctgaagagatgttagctaaaatgctggacgctggcatgaacgttatgcgtctgaacttctctcatggtgactatgcagaacacggtcagcgcattcagaatctgcgcaacgtgatgagcaaaactggtaaaaccgccgctatcctgcttgataccaaaggtccggaaatccgcaccatgaaactggaaggcggtaacgacgtttctctgaaagctggtcagacctttactttcaccactgataaatctgttatcggcaacagcgaaatggttgcggtaacgtatgaaggtttcactactgacctgtctgttggcaacaccgtactggttgacgatggtctgatcggtatggaagttaccgccattgaaggtaacaaagttatctgtaaagtgctgaacaacggtgacctgggcgaaaacaaaggtgtgaacctgcctggcgtttccattgctctgccagcactggctgaaaaagacaaacaggacctgatctttggttgcgaacaaggcgtagactttgttgctgcttcctttattcgtaagcgttctgacgttatcgaaatccgtgagcacctgaaagcgcacggcggcgaaaacatccacatcatctccaaaatcgaaaaccaggaaggcctcaacaacttcgacgaaatcctcgaagcctctgacggcatcatggttgcgcgtggcgacctgggtgtagaaatcccggtagaagaagttatcttcgcccagaagatgatgatcgaaaaatgtatccgtgcacgtaaagtcgttatcactgcgacccagatgctggattccatgatcaaaaacccacgcccgactcgcgcagaagccggtgacgttgcaaacgccatcctcgacggtactgacgcagtgatgctgtctggtgaatccgcaaaaggtaaatacccgctggaagcggtttctatcatggcgaccatctgcgaacgtaccgaccgcgtgatgaacagccgtctcgagttcaacaatgacaaccgtaaactgcgcattaccgaagcggtatgccgtggtgccgttgaaactgctgaaaaactggatgctccgctgatcgtggttgctactcagggcggtaaatctgctcgcgcagtacgtaaatacttcccggatgccaccatcctggcactgaccaccaacgaaaaaacggctcatcagttggtactgagcaaaggcgttgtgccgcagcttgttaaagagatcacttctactgatgatttctaccgtctgggtaaagaactggctctgcagagcggtctggcacacaaaggtgacgttgtagttatggtttctggtgcactggtaccgagcggcactactaacaccgcatctgttcacgtcctgtaatattgcttttgtgaattaatttgtatatcgaagcgccctgatgggcgctttttttatttaatcgataaccagaagcaataaaaaatcaaatcggatttcactatataatctcactttatctaagatgaatccgatggaagcatcctgttttctctcaatttttttatctaaaacccagcgttcgatgcttctttgagcgaacgatcaaaaataagtgccttcccatcaaaaaaatattctcaacataaaaaactttgtgtaatacttgtaacgctacatggagattaactcaatctagagggtattaataatgaaagctactaaactggtactgggcgcggtaatcctgggttctactctgctggcaggttgctccagcaacgctaaaatcgatcagctgtcttctgacgttcagactctgaacgctaaagttgaccagctgagcaacgacgtgaacgcaatgcgttccgacgttcaggctgctaaagatgacgcagctcgtgctaaccagcgtctggacaacatggctactaaataccgcaagtaatagtacctgtgaagtgaaaaatggcgcacattgtgcgccattttttttgtctgccgtttaccgttactgcgtcacgcgtaacatattcccttgctctggttcaccattctgcgcactctctacactaggcgcattgctggctgcgggagttgctccactgctcacgctaaccggataccctgcccgacgatacaacgctttatcgactaacttctgatctacagccttattgtctttaaattgcgtaaagcctgctggcagtgtgtatggcattgtctgaacgttctgctgttcttctgcgcttagtggtcgatgtacttcaacataacgcatcccgttaggctccacggaatatttcaccggttcgttgatcactttcaccggcgttcccgtccgcacgctggagaacaaggctttaatatccggtgcattcatgcgaatacacccactactgacgcgcaaaccgacgctgtccggcgcactggtaccatgaatgaggtattcgccattaccatgcgcgaggcgcagtgcgtaacgtcctagcgggttatttggtccggcaggaacgactggcggtaatttaatgccacgctccaggctacgctgacgaatgcctgccgtaggcgtccaggttgggttagggattttctgcccaacacgcgtttccatcaccggcgtttccagcccctgcaatccaatacctattggataaacctgcacaatattttctcccggcggataataataaaggcgcagctctgcaaggttaacgataatcccctgacgcggtgcatcaggtaataacagttgactaggaatagttatcgtcgtaccaggttttggcaccggggcgatagtgttattggcttcaaggatcaacattgccgcagtatcaaaacgtcgggcaatagcctgaaggtttttatccccttcttgcaccgtatacgtttgattttgcccaaccagtcggcttccggttggtggtagcggataatcaaccgcccaggcagcctggatggcgctaaaagcgccgataagcgtgagtgtaagcaaagacgcgcgtttcattgtaaacctcctgtatttgccggagactcacgctgaaacgtcggatggcgcttatgttcacctgaaaccaaaacactcctgtgcaggtcagtgtaaacattgaccatccggcaatgtgagccaaccggatgaaagctgtccttttagtttagctaagtgcagcggctttggcgcgaattgcgcgaatcatcgcttccagaccttgactacgagatggggtgagatgttgggtgagcgccattttttcaaaccacggacgcacatcgaaattgacaatatcctgcggcgtcatctgatcgtagagaataaagacgaccgcaataagccctttcacaatcgccgcatcgctgtcgccctgtaattcaataattccctgggcattctggcgcatgacaatccacacctgactctgacagccctgaatgctattttgtggacttctgtcttcgtcgcgtaattctggcagacgctggcccagctcaataatgtagagatatttctcttcccagttggcgcagcgtaaaaaattacgcagcaacttttctttatccggcaataaagccatagtgcctccctgttatcccagcaaacggtgaatacgttgcaggccggtcaccagacgatccacttcttcatgggtgttatacatggccaggctcgcccgacacatcgcagggacgttgtaataggccatcaatggcattgcgcagtgatgtccggtacgcacagcaatgccgtaattatcgagaaaactgccaacatcataggcgtggtgtttaccgagattaaaagcaataacgccaagcctgttttgtgggccatagagagtgagatccggtacagattccagctgacttagcgcataatgcatcagattctgttcatactcggctatgttattaagccccagcgcgctaacatactccagcgccgcgccaagaccaatgatgcccccggtattgggtgtaccggcttcaaaccgccatggtgctttggtccaggtagtgccttcactcaggctgacggtggcgatcatagaaccgcccccttcccacggcggcatctcctgcaacaaggcttctttcacataaagaatgccaattccggtggggccatacagtttatgcccggagaacacgtaaaagtcgcaatccagcgcctgaacatccaccggatgatgcatcaccgcctgagcgccatccaccagcacttttgcgccatgctggtgcgcaagcgtgatcatttccgccagtggattttctgtgccaagcacgttggagacatgagtaattgccagcaggcgagttttctcatcaaacagcgtaggcagcgtctccagttgcaacgtaccatcgggattgagcgggatcacacgcagctctgcgccaacgcgtgcgcaaagcatctgccagggaacaatgttagcgtggtgctccatctgactgatgatgatgttatcgcccgcccgcacgttgctgttgccccagctattggcgaccagattgatcccttccgtcgtgccgcggacgaacaccagctcttccgcgctacgggcattaataaacaggcttgcccgcttgcgcacgttctccattttctcggtcgcctgggcgcttaaggtatgaataccacgatgcaccgccgcgtagccatgacgataaaactcggcctcggcgtcaatcacctggctcggtttctgcgcactggcggcgctgtcgagataagccagcggcaaaccgtttacctcacggctaagcaccggaaagtcggcccgcactttgtcgacggaaaaaatcatcttgcacctcctggcagccgttgaccgattcgggccagcacctgctgtttaagcccctcatcacgcagtgcttccgtcagttcggcagcgaaggcgtaaatgatcatctgctgggcatcctgctgattgatcccgcggctgcgcagatagaatatctgttcatcatcaatacgccccaccgtcgcgccgtggctgcatttcacatcatctgcatagatttccagctgcggtttcgtatccacttccgccagtttgcccatcagcagattgttgttggtcatctgaccatccgttttgatggcgtgctgcgcgacgttgatcaaaccgttaaataccgcgcggcctttgtcgctgacgatagttttgtgcaactgtcggctgttacaaaaacctttattgtgttccagccaggtacgggtatcacacacctcgtttttcaccggcatcgccaggctattgatccgcagcgtgctgttttcgccattgagttgcgtactggtgttgtgtcgtaacactgcgccacccagcaggaaactgtggctaaatgcggtggcatcctcagccagcaacaaatcgttatgagcaaagtggtgactgagcgggttttcaaacgccagcttgatatgctgcaagtgggcattcgctgcgacgttgatagtgaaccgtgccccggtaaaatgacgagcatcattcaggctgacaaaatgttcgatcaccgttgcttcggcaccttccgccagatccagatgatgtcggtaatgggcagtgttcacctcttcacctgccacgccctgggtgatatgcattaacagcaatggctttgccggccgttgaccgcgcttcacggcgatatgcgtcacgctttgtgccaggctttccgtcaaatgcagaaacacttccgcctgaatagcgtcgggtaaaccctgacggtcgtcgttaatgctcacttcatatccgctgccttcagttgcatcgctcagtgcgggcacgtaacgcccatcgacaaacaccagccgcacggagtctaacgttaacgctaaggcatcacgctgctgtggggatatctctcccgcaatgctgacaaactggctattgatcagcccttccagcggcgtatatttccagttttcatgtttacgtgtcggcagtccggtacgcagcaattgttgtaaatgctgctgtgcttgcggggagcgttttgtcccttcagcttcaaacaagtgatgccactgttgcagcgcgttactgctgttcggtaagccagccataaccctgctcctccagttgtttgaccaacgtgaaatcgccggatttcacaattcgtccctgatatagcacatgaacgtaatcaggcttgatgtagtcgagaatgcgttggtagtgcgtaacaatgatgaaactgcgcttgccatcacgcaggctgttcacgccatcggcgaccacttttaatgcgtcaatatccagcccggagtcgctctcatcaagaatgcataactccggttccagcaccgccatttgcaaaatatcgttgcgctttttctcgccgccggaaaaaccaacgtttacgctacgggttaataaatcttccggcatcttcaggagagcgattttctcttccatcaaatcctgaaaatcaaagcggtcgagcgtttcctggccgcgatagctgcgcaccgcattaagtgccgtttgcaggaaaaactggttactgacacctggaatctccaccggatactggaaggccataaagatgccttcgcccgcgcgatcttccgggctcagcgcaagcaaatctttgcctttgaactcaaccgtgccgcccgtcacttcataatcttctcgcccggcaagcgttgcgcttaaggtacttttgccgctaccgtttggccccataatggcgtgaacttcgccgggatgaacgtcgaggcttaatccgcgcaggatagctttatcttccacgctgacgtgtaaatctttaatacttaacatgtttattccttatccgacgctgtgttcaagactgatggcgaggagtttttgtgcttcaacggcaaattccaacggcagctcgctgaacacgtctttgcagaaaccgttaacaatcatgctgatggcgtcttcttcgctgatcccgcgttgcaggcagtaaaacagttgatcttcaccaatacgacttgtcgttgcctcgtgttccagttgcgcactattgttacgacactcaacatacgggaaggtatgcgccccacaattagcgccaatcagcatactgtcgcactgagtgaaattgcgcgcattggttgccgtcggcatgattttcactaagccgcgataactgttctgactatgtccggcagagatccctttgctgataatggtgcttttggtgtttttaccgatgtggatcatcttggtgccggtatccgcttgctgatgaccgctggtcagcgccacactgtaaaactcaccaatggagttatcgccgcgcaaaatgcagctgggatatttccacgtaatcgcactcccggtttcactttgcgtccaactcattttgctgttttcgccttcgcacaaagcacgcttggtgacgaagttgagaataccgccggtgttgttatcgccaggaaaccagttttgtaccgtggaatatttcacctcggcgtttttatggatgatgacttccaccactgccgcgtgtaactgatagctgtcacgcaccggagcggaacagccttcaatgtagctgacgtagctgtcttcgtcggccaccagaatggtgcgctcaaactgcccggttttttctgcgttaatgcgaaaataggtggaaagttccatcgggcagcgcacgcctttaggcacataaataaacgtaccatcagaggctaccgccgcattaagcgcggcaaagaagttgtcattccccggcaccacggtgccgagatatttacgcaccagttccgggtgatcgtggatcgcctcaccaaaggaacagaaaataattccctgctccgccagtttttcgcgataagtagtggcaacgctaacactgtcgaaaatggcatccaccgccacctctttgccttcccgcacgggaacgcccaactgctcaaacgccgcctccacctctttacttaaaaaggcgttcgcgccagtttgctgcaccgcgccaggttcagacgcgcaagtgtcgtcacaattaccgcagcttggtgcactgtagtagctgtaatcctgataattcagcttgtcgtagtgcgctttcaaccagtgcggttcttccatctccagccatgcgcgataggcgtttagacgaaactccagcatccactccggctcattacgcttcgcgctaattgcgcgcaccacctcttcgtttatcccctttgccagctcatcggtggctaactgggtgaagaatccttctttataattcagcgggccgccggtccaggttttgacatcgtcagttgcttcagtattacgagacatagtaccgcttataccccaaagctttcgccacagccacattcattctgggctttagggttgtgaaatttgaatatctgattaagtccttcacgaacgaaatcgacttccgtgccatcaataaacggcatcgcttgcagcgggacaaacagcttcgcgccgtcgtgttcaaacagcagatcgtctttgtccggctcgctaacactgtcgagcacatagccaaagcccgcgcagcccgtttgcttcacgcctaagcgcacgccgaccatacccggctgctttgccaccagctcacggatgtgtatcgccgctgcgggtgtcagcgttaagccttgccaggcgaaatcttgtgggttaaaggttccactatgcatgtccatcgatttacctcacttcatcgctttcagcgtataacagcatgttagtgataatgattatcagttcaacccagcaaacgcaggggctttaccgtaaaacatgctttttgcctgcttttaataagcatagaccctgatgtgtgggttaacaggcacgctaagaattaggtatctcattgttagataatggttattatctaaggagcattaaggctgtgatgaaaaagaaaaagttgtattgaaaatgactatttaagagataggtaaaaaagtgcagcgttcagaaataagaaaacccttaagtctgtgcgacacaggcttaagggtttctaccccatccggcgcttatctccggcactctcagtggcttagctcttgaaggggcgataagaataatctcataaagctaacccgccgttttaacacaaactgcgattagtattatttttgaacaatatcaggcggtagataagcagtattaagaaggtcatcgaacctggacggaggttaatccaggtcgatttggcgaacttgcggcattaagtcaggatcaatgcacgcccagacgccaggcaaagtagatttcttcttttaattcagcagaagagagagtaagcaggtcagcaaattcaagttctagttgtttcagacgtttgagatattgggcaggactaagattgctctggtcacggcgtaaaaattcaatggccagctgggtgggatcaagttgagtagacatagcatcctcgcttttagacaagacctgcacagtataccaccgtttactgtgcagataatgaccaaaagcaatatgcgtcacacttttctggtgacaacgtcacaaaatggcggtcgtcaatcgactgctacagcacaaacgccctttctcatcgaagatttcaatctgccagacctggtgacggctaccgagatgcaacggtttgcatacgccgcgcacccgcccttctcgtgcgctgcggacgtggttagcattgatttccagaccaaccactttttgctcaccttcggtacataaataaccggcaacggaaccgatactttcggccagtaccacggatgctcctccatgcagcaacccgaaaggctgctttgtccggctgtctactggcattgtcgcttcaagggtgtcatcaccaatatgttcaaagcgaatatccaggaaccccaccatgtttccttcacccatagcattcagtgcttccagggtgattttccgtttccatatcatttaataatctccagtaaagcctgcacaggatggcgtacccccgtgccttcaacccgttttacctggctacggcaggaatatccggtcgccagacagcggttacgcggcagtcgctgcatagcctgatgccaggataactcatagatcccgaggctattttcatggtttttcgcttcatgtccgtaagtccctgccatgccgcagcaacccacgctgacattttccagtttcgcgccaaaacgggcaaatatcgcggcccattgtgctggcgcacccggcaaggcggtaacttcggtacagtgaccaaagaaataccaactttcaccgctgactgtagccactggctgactctcaagtgcgcttgccagccattcattcgccagtaagacgttaaactcgccacgctcctcgcccagcgccagtttatattcatcgcgataacaaagtaccagcgccggatcgacgcccaccattggcatacccagcttcgccatacggttgaggaaatccgccgtctttttcgccgtcttcgcaaaacgattaagaaaacctttaatatgctgggctttgccatttgggctaaatggcagtaacacaggctggaaacctaatttttcgaccagacggacaaaatccgccaccacttgcgcatcgtaatagctggtaaaggggtcctgcaccaccaacactgtgcgcgctttctgctctgcattgagagattcaagctgttccagcgtcatgtttgcgctgcgatgccccaccatttgttgttgtaggctggggacgctcagcagcggcaaatcaaccatgccgatatgtttttcgctgagtttgcgcaccagcggctggttaatgaagaagttaaaggttttcggcgcgcgtgccatcagcggcgcgtagctctcgaccgtagcgacgaggtggtcgcgcagcgggcgtaaataacgggtgtgatagagctgcagaaaacgagagcgaaactccggcacatcaattttgatggggcactgggtgctacacgctttacaggccagacagccgctcatcgcctctttgacttcgtgactgaagtcatattcgcctttattcgcatgccagctattgcgcgtgcgggcaattaacgtccgcaaactgacgccggattcaggcagttcttgttccagtttgagtggatcaacgccgcgatccgccaacaaacgcagccattcacgcaccagcgttgcgcgccctttcggactatgaatccggttctgggtgatcttcatgctcggacacatcggactacgggcatcaaagttgaagcataaaccgttgccgttacactccatcgcaccgcgccactgctggcgtaccgcaatggggatctgccgatcgaatgtaccgcgcttcaccgcgtccactttcatcatcggcgcatcgagaccttctggcgggcaaatcttccctgggttgagtcggttatgcgggtcaaatgccgctttcactttgcgcagttctgcaaaaagttcctcaccgaaaaacgccgggctgtattcagcgcgaaaacctttgccgtgctcgccccacaacaaaccaccgtatttcgcagtcagcgccaccacgtcatcagagatttgcttcatcaaaatctcttgttgaggatcgcacatatccagcgctggacggacgtgcaagacacctgcgtcgacgtgaccgaacataccgtagcttaagccgtggctgtcgagcagcgcgcgaaattcagcaatataatccgccaggtgttccggcggtacgcaggtatcctcagcaaacggaattggcttagcggcacctttggcattgccaagcagaccaacggcttttttgcgcattgcatagatacgttcaacccccgccagctcacggcacacctgccagccgatgacacctgcttgatgactggcgatcagctcatccaaccgcgcacagagtgcatttacccgctcatcaatcagcgcctcatcatcaccagcaaattccacaatgttcagcccgagcatctcttggtcaggcacatcggtaatcaactcgctgacggaatgccagacaatatcttcccgcgccagattcagcactttactgtccaccgtctctacgctaagcgcccgcgcctcaaccataaacggcgcgttacgcagcgcagagtcaaaagagtcatatttgacgttcaccagacggcgcactttaggcaagcgtgtaatatccagccgcgcttcggtaataaaggccagcgtcccttcactacccgtcagaatgcgcgtcaggtcgaactcggtcatctcatcgttaaagacatgacgcagatcgtaaccggtaagaaagcggttaagtttggggaagttgtcgataattaactggcgttgctgacggcaacgttgataaaccgtgttataaattcgcccgattgtggtattggatttacccagcgtttccgccaattcgacgggtaaaggttgcgtatcgagaatatcgccccccaacaacaccgcgcgtacgccaagtacgtgatcactcgttttgccatagaccaggcttccctgaccggatgcatcggtattgatcatcccaccgagcgttgcccggttgctggtgctaagttccggcgcaaaaaagtagccgaacggtttcaggtactgattgagttgatcttttatcaccccggcctcaacgcgcacccagccctcttcagggttaatttcgatgatgcggttcatatggcgggacatatcaacaataatcccctggttgagcgcctgaccgttagtgccggtgccgccgccgcggggggtaaagatcaggctactatagcgttcctgcgcggcaagacgggcgatcagcgccacatctgcggtactacgcggaaataccaccgcatcggggagaagttggtaaatactgttgtcggtgctcattgtcagacgatcggcataacttgtcgccgtatcgccggtaaaaccttgttgctccagctcttgcaaaaaattaagcaccagttgaacgacgccgggtgcctgggaaatctgtggaatcattatattgaccctttcctgcggtctgtgatgtaggtcgatacactattctttcaggctgctgcaatagcgcactgaaaggtgatgtttgtttactctatggatttcgtgttgcaggaaggcggcaagcgagtgaactccaggagcttacaatagtaagtgactggggtgaacgaacgtagccgcagcacatgcaacttgaaatacgacgagtaaatcgtttgcgtgttgcctgagttgttgtaccacatttttttctaacacgcccatcagaattaagggcagaatcggcctgttaaaaaccgctgaaattgctcatcattatgcaggtgagtttcgcgtgttcacgtcgcgtcgacgatttgacgcacaaaaaaggtgaaaagtagttatggtaaatgttcgtcagcccagggatgtcgcacaaattctgcttagcgtgctgtttttagccatcatgattgtggcatgtctgtggattgttcaaccctttattctcggctttgcatgggccggtacggtggttatcgccacctggccggtattgttacgtttgcaaaagatcatgtttggccgccgctctctcgccgttctggtgatgacgctgttattagtgatggtgtttatcatccctattgctttgctggttaacagtatcgtcgacggcagcggcccgctaattaaagccatttccagcggtgacatgacgttacccgatctggcgtggcttaataccattccggtgattggcgcgaagctgtatgcaggctggcacaacttgctggatatgggggggacggcgatcatggcgaaagtccgcccttatattggcaccaccaccacctggttcgttgggcaggcggcgcatatcgggcgctttatggtgcattgtgcgctgatgcttctcttcagtgccctgctgtactggcgcggtgaacaggtggcacaaggcattcgccattttgcaacccgtctggcaggcgttcgcggagatgccgccgtgctgctggcggcacaggctatccgcgcggtggcgctgggtgtggtggtgacggcgttagtacaggcagtgcttggcggtatcggcctcgccgtatccggcgtaccttatgcaacgttgctaacggtgttaatgatcctctcctgccttgtccagcttggcccgttgccggtactgattccggcgattatctggctctactggactggcgataccacctggggaacggtattgttagtgtggagcggtgtggttggcacgctggataacgtcatccgcccaatgttaattcgcatgggtgccgatttaccgctgatcctgattctctctggcgttattggtggtttgattgctttcgggatgatcggtctgtttattggtccggttctgttagccgtttcctggcgtctgtttgccgcgtgggtggaagaagtcccgccgccgacggaccaaccggaagaaattctcgaagaacttggcgaaatcgagaaaccgaataagtaatttctcatcaggcggctctgccgcctgattgttaaccaccgctaattgatatttgcttgctcttccccatattttcctgcttaccgccattcagctggtagtacctgtcgcaaattctttacagtttttaaactaatgagacgaatctgatcgacgcaaaaagtccgtatgcctactattagctcacggttataaatcaacatattgatttataagcatggaaatcccctgagtgaaacaacgaattgctgtgtgtagtctttgcccatctcccacgatgggcttttttttaacatttttccgcttcgctacctcgcccctcactctttccaataatgttgcacaagatactgtgactctcttcaagccgtcagcaggctgataatgttatttatattttattgtttatttcatgcagccattacacgatgaacgcttatgaactccaggcactccgccatatttttgccatgactattgatgaatgcgcgacctggattgcccagaccggtgacagtgaaagctggcgtcagtgggaaaatggcaagtgtgccattcctgatcgtgtagtcgagcaactgttggctatgcgtcagcaaagaaaaaaacatcttcatgccatcatagagaaaataaataaccgcatcggcaacaacaccatgcgttttttccccgacttaaccgcatttcaacgagtctaccctgatggcaattttattgactggaagatctatcaaagcgtagctgctgaattatatgcacacgatctggagcggctttgttaatttttccacagaaaggaattgtcgttgttacaacaataatgaacggatgctgacacaacatcgcttcactttttaaagcacctttgctaagtagaacctatgaaaaatccctatttccctaccgcacttgggttgtattttaattacctggtgcatggtatgggcgtccttttgatgagcctgaatatggccagcctggagacactttggcagactaatgccgcgggtgtcagcatagttatcagtagcctgggcattggtcgattaagtgtcttgctttttgcaggattattatccgatcgctttggtcgccgcccttttatcatgctcgggatgtgctgctatatggccttcttttttggcatcctgcagaccaataacatcattatcgcttatgtttttggctttctggcgggaatggcaaacagttttctcgatgcaggcacttatcccagtttgatggaagcttttccacgcagtcctgggacagccaatattttaattaaagcatttgtttccagcggacaatttttattaccgctaatcattagcctgttagtgtgggctgaactgtggttcggttggtcctttatgattgctgcaggcattatgtttattaacgctctgtttttataccgttgtacgttcccaccccatccgggtcgtcgcttacctgtcataaagaaaaccaccagctctacggaacatcgctgtagtattatcgatttagccagttataccttatatggctatatcagtatggcaacgttttatctggttagccagtggctggcacagtacggacaatttgttgcaggcatgagttacactatgagcatcaaactactcagtatctacaccgtgggtagcctgctttgtgtatttattaccgctccactcattcgtaataccgttcgcccaacaacattactgatgctgtacacctttatcagttttattgctctgtttaccgtctgcctgcatcccacattttatgtggtgataatatttgcttttgtcattggttttacctctgctggaggtgttgtgcaaattggcctgacgttaatggctgaacgtttcccttacgctaaaggtaaagctacagggatctattacagtgcgggcagtattgcgacctttactattccgttgattacggctcatctgtcccaaagaagtattgccgatattatgtggttcgataccgccatcgctgccatcggttttttactggcactgtttatcggcttacgcagccgcaaaaaaacgcggcatcacagcctaaaggaaaatgtcgctccgggtgggtaatgcaatattcttttcaggtcatgcaagatcttacggataaataactctttctgcgctaactaaggaaaatcgcgatcaaaaacaaactatgacatgcaatattcctggaaacataaactttatgccatgtacccagggaaaatcatcttcagtatagtaattatgtaaaccgtcggagaacaatacgtacggtaacgaaattatctttcagcaaggagctgtgaaaatgtctcaaaataaggctttcagcacgccatttatcctggctgttctttgtatttacttcagctacttcctgcacggcattagtgttattacgcttgcccaaaatatgagttctctggcggaaaagttttccactgacaacgcgggcattgcctacttaatttccggtatcggtttggggcgattgatcagtattttattcttcggtgtgatctccgataagtttggtcgtcgggcggtgatattaatggcagtaataatgtatctgctattcttctttggtattcccgcttgcccgaatttaactctcgcctacggtctggcagtgtgcgtaggtatcgctaacagtgcgctggatacgggtggctaccccgcgctcatggaatgctttccgaaagcctctggtagcgcggtcatactggttaaagcgatggtgagttttgggcaaatgttctacccaatgctggtgagctatatgttgctcaataatatctggtacggctatgggctgattattccgggtattctatttgtactgatcacgctgatgctgttgaaaagcaaattccccagccagttggtggacgccagcgtaactaatgaattaccgcaaatgaacagcaaaccgttagtctggctggaaggtgttagtagcgtactgttcggtgtagccgcattcagcaccttttatgtgattgtggtgtggatgcccaaatatgcgatggcttttgctggtatgagtgaagctgaggcattaaaaaccatctcttattacagtatgggcagcttggtctgtgtctttatttttgccgcactactgaaaaaaatggtccggcccatctgggctaatgtatttaactctgcactggcaacaataacagcagccattatctacctgtacccttctccactggtgtgcaatgccggagcctttgttatcggtttcagtgcagctggcggcattttacagctcggcgttagcgtcatgagtgagttttttcccaaaagcaaagccaaagtcaccagtatttatatgatgatgggtggactggctaactttgttattccactgattaccggttatctgagcaacatcggcctgcaatatatcattgttctcgattttactttcgcgctgctggccctgattaccgcaattattgtttttatccgctattaccgcgttttcattattcctgaaaatgatgtgcggtttggcgagcgtaaattttgcacccggttaaacacaattaagcatagaggttaaaggagttaattatggatgttaccgcaaaatacgaattgattgggttgatggcctatcctatccgccacagtttaagccccgaaatgcagaataaagccttagaaaaagcgggattgccatttacctatatggccttcgaagtggataacgatagctttcctggagcaattgaaggattaaaagccctcaaaatgcgcggaactggtgtaagcatgccgaacaaacaactggcgtgtgaatatgttgatgaattaacaccagctgccaaactggtgggggccatcaacaccatcgttaatgatgatggctatctgcgtggctataacaccgacggcacgggccatattcgcgccattaaagagagcggttttgatatcaaaggcaaaacgatggtgctgttaggggccggtggtgccagtacggcaattggcgcgcagggggcaattgaaggtttaaaagaaattaaactctttaaccgtcgggatgagttcttcgataaagccctcgccttcgcgcagcgggttaatgaaaacaccgattgtgtcgtcacggtcaccgatctcgccgatcagcaagcctttgctgaagccctggcttccgccgacattttaaccaatggcacaaaagtgggtatgaaaccccttgagaatgaaagtttggttaatgatatcagtctgttacatccgggacttctggtcactgaatgcgtgtataacccgcatatgacgaagttattgcagcaggcgcaacaagctggttgcaaaacgattgatggatacggcatgttgttgtggcaaggggctgaacagttcacattatggactggcaaagatttccctctggaatatgttaaacaggtcatggggttcggtgcctgacaggctgaccgcgtgcagaaagggtaaaaaatgaaaaccgtaactgtaaaagatctcgtcattggtacgggcgcacctaaaatcatcgtcagcctgatggcgaaagatatcgccagcgtgaaatccgaagctctcgcctatcgtgaagcggactttgatattctggaatggcgtgtggaccactatgccgacctctccaatgtggagtctgtcatggcggcagcaaaaattctccgtgagaccatgccagaaaaaccgctgctgtttaccttccgcagtgccaaagaaggcggcgagcaggcgatttccaccgaggcttatattgcactcaatcgtgcagccatcgacagcggcctggttgatatgatcgatctggagttatttaccggtgatgatcaggttaaagaaaccgtcgcctacgcccacgcgcatgatgtgaaagtagtcatgtccaaccatgacttccataaaacgccggaagccgaagaaatcattgcccgtctgcgcaaaatgcaatccttcgacgccgatattcctaagattgcgctgatgccgcaaagtaccagcgatgtgctgacgttgcttgccgcgaccctggagatgcaggagcagtatgccgatcgtccaattatcacgatgagcatggcaaaaactggcgtaatttctcgtctggctggtgaagtatttggcagcgcggcaacttttggtgcggtaaaaaaagcgtctgcgccagggcaaatcagcgtaaatgatttgcgcacggtattaactattttacaccaggcataagcaataatatttcggcgggaacaccctccccgccgaactaaaaaatatattcaatcgtatttaataaaaatatttcgtgagtctctgtgcgctaattctccatttggcgtagggaaaatcacatctgaatcaggaattaacaatgaaacctgtaaaaccacctcgtattaatggacgagtgccggtcctgagcgcacaggaagcggtgaattatattcccgacgaagcaacactttgtgtgttaggcgctggcggcggtattctggaagccaccacgttaattactgctcttgctgataaatataaacagactcaaacaccacgtaatttaagcattattagtccaacagggcttggcgatcgcgccgaccgtggtattagtcctctggcgcaagaaggtctggtgaaatgggcattatgtggtcactggggacaaagcccgcgtatttctgaactcgcagaacaaaataaaattattgcttataactacccacaaggtgtacttacacaaaccttacgcgccgccgcagcccaccagcctggtattattagtgatattggcatcgggacatttgtcgatccacgccagcaaggcggcaaactgaatgaagtcactaaagaagacctgattaaactggtcgagtttgataacaaagaatatctctattacaaagcgattgcgccagatattgccttcattcgcgctaccacctgcgacagtgaaggctacgccacttttgaagatgaggtgatgtatctcgacgcattggttattgcccaggcggtgcacaataacggcggtattgtgatgatgcaggtgcagaaaatggttaagaaagccacgctgcatcctaaatctgtccgtattccgggttatctggtggatattgtggtggtcgatccggatcaaacccaactgtatggcggtgcaccggttaaccgctttatttctggtgacttcacccttgatgacagtaccaaacttagcctgcccctaaaccaacgtaaattagttgcgcggcgcgcattattcgaaatgcgtaaaggcgcggtggggaatgtcggcgtcggtattgctgacggcattggcctggtcgcccgagaagaaggttgtgctgatgactttattctgacggtagaaacaggtccgattggcggaattactagtcaggggatcgcctttggcgcgaacgtgaatacccgtgccattctggatatgacgtcccagtttgatttttatcacggtggcggtctggatgtttgttatttgagttttgctgaagtcgaccagcacggtaacgtcggcgtgcataaattcaatggtaaaatcatgggcaccggtggatttattgatatcagtgccactagcaagaaaatcattttctgcggcacattaactgcgggcagtttaaaaacagaaattaccgacggcaaattaaatatcgtccaggaaggacgggtgaagaaatttattcgggaactaccggaaattactttcagcggaaaaatcgctctcgagcgagggctggatgttcgttatatcactgagcgcgcagtattcacgctgaaagaagacggcctgcatttaatcgaaatcgcccctggcgtcgatttacaaaaagatattctcgacaaaatggatttcaccccagtgattagcccagaactcaaactgatggacgaaagattatttatcgatgcggcgatgggttttgtcctgcctgaagcggctcattaacaggagtataatgatggatttttctttaactgaagaacaagaactgctgctggccagtattcgcgaactgattacgactaactttccggaagagtatttccgcacctgcgatcaaaacgggacatatccgcgtgagtttatgcgggcgctggcggataacggtatttccatgcttggcgtgccggaagaatttggtggtatccctgcggattacgtcacccaaatgctggcgctgatggaagtgagtaaatgcggtgctccggcatttttaattaccaacggtcaatgtattcacagtatgcgccgtttcggttctgcagagcagctacgtaaaacggcagagagcaccctggaaacgggtgatcccgcctatgccctggcgttgacggaaccaggtgctggcagtgataacaacagtgccactaccacttacacgcgtaaaaacggcaaggtctacatcaacggacaaaaaacctttattaccggtgcgaaagagtacccgtatatgctggtgctggcgcgcgatccgcaaccgaaagatcccaaaaaagccttcaccctgtggtgggtcgactccagtaagcccggcattaagattaacccgctgcataaaatcggctggcatatgctcagcacctgcgaagtctatctcgacaacgtggaggttgaagagagcgacatggtgggcgaagaaggaatgggtttcctcaatgtgatgtacaactttgagatggagcgcctgatcaacgccgcgcgcagcaccggctttgccgaatgcgcctttgaagatgccgcccgctatgccaaccaacgtatcgcttttggtaagcccattggtcataaccagatgatccaggaaaaactggcgctgatggcgattaagatcgacaacatgcgcaacatggtgctgaaagtggcatggcaagccgatcagcatcagagtctgcgcaccagcgcggcgctggcaaaactgtactgtgcacgtaccgcaatggaagtcattgatgatgcgattcaaatcatgggcggtctgggctataccgatgaggcgcgcgtctcccgcttctggcgtgatgtccgttgtgaacgtatcggcggcggtacagacgaaattatgatttacgtagcaggtcggcagatcctgaaagactatcagaacaaataatctgcaggcggcgcagcttcttaacaaactgcgccgccagatttatccaacaagacttaccggttgaggaaattcagataggatttcttgttccgcaaaacagtttttaaattgtctacggtaatcgctggggctacaaccgacatggcgcaaaaacagtttggcaaagtgatcgacattttcataacccacacgccaggagatctctgcctgacttaattcagtattagtgagactccattttgcttccgtcatacgccgttgaataacatagttaataggggaaatacgatactctttggtaaattcatggcaaatataactgacgctggcacgaaattttttgcttaactgttctaaagtgattttttcgcgataattattattcagatagaaaagaatatcttttatcagaacatcttttttaatatacccctgctcgctacgataagcatttttaaaattttcgtagtaaagaatggctaacgtataggcaaatgcatcccataagctagatgtttggctatttttactttgcggcaaaatcacacttagctcattaaataaggtttttatgacttcttttccctgccccgcggcaattaccggacaagaatgcggttgcagtagctgattttcctcagccccctgaaactgaaagccgtacagcgcacaggtacacgtcgttgccggatcgttaacgtcagaggccaccgcatgcagcctgccgcgttctatcaccacaatgtcatccgcatgtgcgacatataagctagaatcgatggtaaaccttgcaacccctttcttgacgtaaatcaactcggtttcattgtcatgaacgtgatgtccggactcccattttggatcatcgctaaatgcaaaacgactaagccgtggcgttttaccggcgacaaacagcgtttcactggcgttatcaaaacagcgttgatacatgacaacctccctattccatgagcaagcaaaaacaatatatgccggataaaatacggcgtgtattgcggttatacaaccgcgtttagcgagagctaaacaagattatttacactgaatgcaagattgtacggtcatggaataactatattgccgcaaattgcacttttgttttagcgatcgcattttttttgcaagattgttggcaaggaaaacagcttgctccgtcgaaaaccccgcaccgctatcgcacactattttcaggccatttttaccttccatcggagatggttccgtatgcgactcacaggagaaatcatgaaaataataacctgctttaagctggtgcctgaagaacaggacattgttgtcactccagaatacaccctgaatttcgacaatgccgacgccaaaatcagccagttcgatctcaatgccattgaagctgcaagccagctcgcaacagatgacgatgagatagccgcgctgaccgttggcggcagtttgttgcagaacagcaaagtgcgcaaagacgtgctatcccgcgggccgcacagcctgtatttggtgcaggatgcgcaacttgaacatgcactgcctctcgataccgcaaaagcgctggcggcagcaattgaaaagatcggcttcgatttactgatctttggtgaaggttccggcgacctttatgcccagcaggttggcttgctggtcggagaaattctgcaacttccggtgattaatgcagtgagtgctattcagcgtcagggcaatacactggtgattgaacgcacgcttgaagatgatgttgaagttattgaactctctgttccagccgtgctctgcgtcacctccgatattaacgtgccacgcattcctagcatgaaagccattctcggcgcgggtaaaaaaccggtaaatcagtggcaggcaagtgatattgactggagccagagcgcgccacttgctgaactggtcggcattcgcgtaccgccgcaaacagaacgtaagcacatcattatcgataacgatagcccggaggccattgccgagctggcggaacatctgaagaaagccctgaactgaagcctacggagaagaaacgatgagtcaattaaacagcgtctgggtctttagcgataatcctgaacgttatgctgaactgtttggcggcgctcagcaatggggccaacaggtgtatgccattgtacaaaataccgaccaggcgcaggcagttatgccttatggtccaaaatgtctttatgttcttgcgcaaaacgacgcgctgcaacgcactgaaaattacgccgaaagcattgctgccctgctgaaagataaacaccccgctatgttgctgttggccgcgacgaaacgtggtaaagcgctggcagcacggttaagtgtgcaactgaatgcggcgctggtgaacgatgccacggcggtggatattgtcgatggtcacatttgcgccgaacaccggatgtatggcgggttagcgttcgctcaggaaaagatcaacagcccgctggcgatcattacccttgcacccggtgttcaggaaccgtgcaccagtgatacctctcatcagtgcccgacagaaacggtaccttatgttgctccgcgtcatgaaattctctgtcgcgaacgccgtgcgaaagccgcaagcagcgtggacctgagcaaagcaaaacgtgtggttggcgtcggtcgtggactggcggcgcaggatgacctaaaaatggtccacgaactggcggcggtgctgaatgctgaagtcggctgtagtcgtccaattgccgaaggcgagaactggatggagcgtgaacgttatatcggtgtctccggcgtgttgctgaaatccgatctctacctgacgctggggatctccgggcagatccagcatatggttggcggcaacggcgcaaaagtgattgtcgccatcaataaagataaaaatgcgccaatcttcaactatgccgactacggtctggtgggcgatatctacaaagtcgtccctgccctgattagccagttgagccgctaattcccctttcaaccacatctcccgctgtaaacgcagcgggaagggagcataacgcatgagcgatgacaaatttgatgccattgtggtcggtgcgggcgttgctggtagcgttgccgcactggtcatggcacgagccgggctggatgtcctggtgatagaacgcggcgacagtgccggatgtaaaaacatgaccggcgggcgtctttatgcccacacacttgaagcaatcattccaggctttgcagtaagtgcgccggtagaacgcaaggtcacacgcgagaaaatctccttcttaaccgaagaaagcgccgttaccctcgattttcaccgcgagcagccagatgttccgcaacacgcatcttataccgtattgcgtaatcgtctggacccgtggttgatggaacaagccgagcaggcgggcgcgcagtttatcccaggcgttcgcgtcgacgcgctggttcgtgaaggaaacaaggtcactggcgtgcaggctggggatgatattctcgaagcgaatgtggtgattctggctgatggcgttaacagcatgcttggccgcagcctgggaatggttcccgcttccgatccgcatcattacgctgttggtgttaaagaggttattggcctcacaccagaacagatcaacgatcgctttaatattacgggcgaggaaggtgccgcctggctgtttgccggttccccttctgacggcctgatgggcgggggatttctctataccaacaaggattccatatccttggggctggtttgtggattgggtgatatcgcccatgcgcaaaaaagcgtgccgcaaatgctggaagattttaaacaacaccccgccattcgcccgctgattagcggcggcaaactgcttgaatattccgcgcatatggtgccggaaggcggtctggcaatggtgccgcaactggttaacgagggcgtgatgatcgttggtgacgccgcaggcttctgcctgaatttgggttttacggtccgcggcatggatttagccattgcaagcgctcaggctgccgccacaacggtgatcgccgccaaagaacgcgcggatttctccgccagcagtctggcgcaatacaaacgtgagctggaacaaagctgcgtcatgcgtgatatgcagcattttcgcaagatcccggcgctgatggaaaacccgcgcctgtttagccaatacccacgaatggtagccgacatcatgaacgagatgttcaccatcgacggcaaaccaaaccagccggtacgaaaaatgatcatgggacatgcgaagaaaattgggctgatcaacttgctgaaagatggcattaagggagcaaccgcgctatgagccagaacgctacggttaacgtcgacatcaaattaggcgtcaataaattccatgttgatgagggccacccgcatatcattctggcggaaaatcccgatatcaatgaattccataaattaatgaaagcctgccctgccggactttataagcaggatgacgcaggaaacattcattttgattccgccggttgtctggagtgcggcacctgtcgggtgctgtgcggtaacactattctcgaacagtggcaatatcccgcaggcaccttcggtattgattttcgctacggctaatcatgcatcccacaggcccgcatctcgggcctgatgttctgtttcgagagtccaacatgaaagtgacattaacgtttaacgaacaacgtcgtgcggcgtatcgtcagcaagggttatggggcgatgctagcctggccgattactggcagcagaccgctcgtgcgatgccagacaaaattgccgtggtcgataatcatggtgcaagctacacctatagcgcgctcgatcacgccgcgagctgtctggcaaactggatgttagcgaagggtattgaaagtggcgatcgcatcgcatttcaactgcctggctggtgtgaatttaccgttatctatcttgcctgcctgaaaatcggtgcagtttccgtgccgctgttgccttcctggcgggaagcagaactggtgtgggtgctcaataagtgtcaggcaaaaatgttctttgcaccgacgttgtttaaacaaacgcgtccggtagatttaatcctgccgctgcaaaatcagcttccacaactacaacaaattgtcggcgtggacaaactggctcccgccacctcttccctcagtttaagtcagattatcgccgacaataccagtctgaccacggcgataacgacccacggcgatgaattagctgcggtgctgtttacctccggaaccgagggtctgccaaagggcgtgatgctaacgcataacaatattctcgccagtgagcgggcttattgcgcgcgactgaatctgacctggcaggatgtctttatgatgcctgcgccacttggtcacgcaacgggctttctgcatggcgtaacggcaccattcttaattggcgctcgcagcgtgttgttagatattttcactcctgatgcgtgtctcgcgctgcttgagcagcagcgttgcacctgtatgctcggcgcaacgccgtttgtctatgatcttttgaatgtactagagaaacaacccgcggaccttagtgcgctgcgtttctttctttgcggcggaaccacaatccccaaaaaagtggcgcgtgaatgccagcagcgcggcattaaattattaagtgtttatggttccacagaaagtagcccgcatgcggtggtgaatctcgatgatcctttgagccgctttatgcacaccgatggttacgctgccgcaggtgtagagattaaagtggtcgatgacgcacgcaagaccttaccgccaggttgcgaaggtgaagaagccagccgtggccccaatgtgtttatggggtattttgatgaacctgaattaaccgcccgtgccctggatgaagaaggctggtattacagcggcgatctctgccgtatggatgaggctggctatataaaaattaccggacgcaaaaaagatattattgtccgcggcggcgaaaatattagcagccgtgaagtggaagatattttattgcagcatcctaaaattcacgatgcctgtgtggttgcaatgtccgatgaacgtttaggtgaacgaagttgcgcttatgtcgtgctgaaagcgccgcatcatagtttaagcctggaagaggtagtggctttttttagccgtaaacgggtcgcaaaatataaatatcctgaacatatcgtggtaatcgaaaaactaccgcgaactaccagtggtaaaatacaaaagtttttgttaagaaaagatattatgcggcgtttaacgcaggatgtctgtgaagagattgaataagtttcatcttcggggatcacataaccccggcgactaaacgccgccggggatttattttatttcttcagttcagccaggcttaaccaggtttgcaccacggtgtccgggttcagagacaggctatcgatcccctcttccatcaaccatgcggcaaagtcttcgtggtcggacggaccctgaccgcaaatcccgacatatttgccctgtttcttcgcggcacggatagccatgctcagcagtgctttcaccgcatcgttgcgctcatcgaacaattcagacaccacgccggagtcacggtccagaccgagcgccagctgcgtcatatcgttactgccaatactgaagccgtcgaaatattcgaggaactgctcggccagcaaggcgttggacgggatttcacacatcatgatgattttcagcccgttctcgccacgtttcagcccctgacgcgccagttcttcaaccaccgctttcgcctgatctacggtacgcacgaacgggatcatgatctcaacgttggtcagtcccatgtcgttgcgcacacgtttcactgcttcacactccagcgcgaaacagtcgcggaagctgtcggaaacatagcggcccgcgccacggaagccgagcatcgggttctcttcatctggctcgtaacgctcaccaccgaccaggttggcatattcgttgcttttaaaatcagagagacggacaatgacgcgcttcggataaaacgcggcacccagcgtcgcgatcccttcagtcagacgaccaacgtaaaattcacgcggagaatcaaaacctttcatcatctcgcggatttcgttttgcaactgcggttcctgatcgtcaaactcaagcagtgcgcgtgggtggacgccaatcatacggttgatgataaattccagacgcgcaaggcccacgccttcgttcggtaggcaggcgaagtcgaaagcacggtccgggttaccgacgttcatcatcactttcaacggcagatccggcatcgtttctacgctggagcttttcacgctaaattccagcaactccgcatagacgtaaccggtatcaccttcggcacaagaaacagtgacgttctcaccgtctttcatccgttctgttgcatctccacagcccactaccgccggaatgcccagttcacgagcgatgatcgccgcgtgacaggtacgaccgccacggttggtgacgatggcagatgctttcttcatgatcggttcccagtccgggtcggtcatgtcagtaaccagcacgtcgccaggttcgatgcggttcatttcgctgatgtcatggatgactttcaccggacccgcaccgatgcgatgaccgatagcacggccttcggcgataatcttaccctgactatgcagcgtataacgctccatgacctgaccgcgactgcgcacggtttccggacgcgcctgcacaatgaacagtttaccggtgtggccatctttcgcccactcaatatccatcgggcgaccgtagtgtttctcaatttgtacggcctgttttgccagttcctgcacttcttcgttggtcaggctgaagatgtcacgctgttcctgcggtacgtcttcgattttaacctgcttgccgtgctcctgggtcggcgcgtaaaccatgcggatttttttgctccccatggtgcggcgcacgatagccgggcgattcgccgccagtgtcggtttatgcacgtaaaactcatccgggttaaccgcaccctgcacgaccatctcaccaaggccccatgcggaagtgataaacaccacctggtcaaagccggattcggtatcaatggagaacatcacgccagaacttgcgaggtcagagcgcaccatccgttgaacaccggcggagagcgccacaccacggtgatcgtaaccctggtgcacacgataagagatggcgcgatcgttaaacagagaagcaaatacatgtttcactgccacgagaacggcgtcaaaaccctgaacgttgaggaaggtttcctgctgaccggcaaaagaagcgtccggcatatcttctgcggtggcggaggagcgcaccgcaaaagaggcgttttcgtcatcggcggaaagctgtgcataggcttcgcggatggcgttttccagctcaggctggaagggagtgtcgataatccactggcggatttgcgcgcccgctttcgcaagctgagtaacatcgtcaatatccgttttatccagcagttcataaatgcgctggtttacgccgctttggtccagaaactggttaaacgcgtcggcggttgtggcgaaaccattcggaacggaaacacccattccggaaagattagtaatcatttcacccagggaggcatttttgcccccaaccctgtctacatcattcatgccgagttggttataccaaagcaccagcggactgctgccattgttggacatcgaacaatccttttgtgataaatgaacggtttgagaaacacatttctgcgcatttatctttgcatatttaaccggatgaaaaaaacggtgaatcgttcaagcaaatatatttttttactttttaagactgatcccagcgttgcgcaaatctgctctcttcgacaatttccacataaaccatcggtataaacgaaaccataaaaatgaaatgctgttttcataaaaaataaaattgaaggttcattttataaaccagacataacgttctacgcttctgtgcgtttttaatttatgctttcatagaattatgtctgcatcacgggaagaacaaaatggataatgctgttgatcgccacgttttttatatttctgatggtacggcaataactgcggaggtattaggacacgcagtaatgagtcaatttcccgtcactatcagcagcatcacgctgccgtttgtcgaaaatgagagccgtgcacgggcagtgaaggatcagattgacgcaatttatcaccagacaggcgtgcgcccgctggtcttctactccatcgtgttgccggagattcgcgccatcatcttgcaaagtgaaggcttttgccaggatatcgttcaggcgctggttgccccgctacaacaagagatgaaactggatccaacgccgattgctcatcgtacccatggccttaaccctaataatctcaataaatatgatgcgcgcattgcggcgattgattacaccctcgcccacgatgacggcattagcttgcgcaatctggaccaggctcaggtgatcctgctcggtgtttctcgctgtggtaaaacccccaccagtctgtatctggcaatgcagtttggtatccgcgcggcaaactacccctttattgccgacgatatggataatctggtgctacccgcgagcctcaaaccgcttcagcataaattgttcggcctgactatcgacccggaacgtctggcggcgattcgcgaggaacgtcgggagaacagtcgctatgccagccttcgtcagtgcaggatggaagtcgcggaagtggaagccttgtaccgtaaaaatcagatcccgtggattaacagtaccaattatagcgtagaagagattgccaccaagatcctcgatatcatgggccttagtcgccgaatgtactaaagaactagtgcattagcttatttttttgttatcatgctaaccacccggcgaggtgtgacacacctcgcacttgaaatcagcagcgattggtttatcgtgatgcgcatcacttcccggcagtcctgccgtagaagcaacaaatttctgagacttgtaatgaacagaactgacgaactccgtactgcgcgtattgagagcctggtaacgcccgccgaactcgcgctacggtatcccgtaacgcctggcgtcgccacccatgtcaccgactcccgccgcagaattgaaaaaatactgaatggtgaagataagcgactgttggtcattattggcccctgcagcatccacgatctcaccgctgcaatggagtacgccacccgtctgcagagcctgcgcaaccagtaccagagtcggctggaaatcgtaatgcgcacctattttgaaaaaccacgaactgttgtcggctggaaaggactaatctccgatccagatttaaacggcagctatcgggtaaatcacggtctggagctggcgcgcaaattacttttacaggtaaatgagctgggcgtcccaaccgcgaccgagttcctcgatatggtgaccggtcagtttattgctgatttaatcagttggggcgcgattggcgcacgtactaccgaaagtcagatccaccgcgaaatggctagcgcactctcctgtccggtaggttttaaaaatggtaccgatggcaatacgcggattgctgtggatgctatccgcgcagcccgcgccagccatatgttcctcagcccagacaaaaatggtcagatgaccatctatcagaccagcggcaacccgtatggccacattattatgcgtggcggcaaaaaaccgaattatcatgccgatgatatcgccgcagcctgcgatacgctgcacgagtttgatttacctgaacatctggtggtggatttcagccacggtaactgccagaagcagcaccgtcgccagttagaagtttgtgaggatatttgtcagcaaatccgcaatggctctacggcgattgctggaattatggcggaaagtttcctgcgcgaaggaacgcaaaaaatcgtcggcagtcagccgctcacttacggtcaatccattaccgacccgtgtctgggctgggaggataccgaacgcctggtcgaaaaactcgcctctgcggtagatacccgcttctgaatgcgtgcccattcctgacggaatgggcatttctgcgcaacttgttgtcttctcaacaaattactgcttgctctggtcagccataatattgataataagaatcattgttatatcaattattattaatttttatgcgttatacggatagcagaaaactcacgcctgaaacggatgccaatcacaagaccgcttccccgcagcctattcggcgaatttccagccagacactgttaggtccggatggcaaactgattatcgatcatgacgggcaagaatatctgctccgtaaaactcaggctggcaagctgctgttgaccaagtaacctttaactgctgcagctgacttccagccgtttaccccagtcaggtggacgactgacatagtcatcatctctgtcgctgaaaggatttcgcaacgcctcatgcaggcggtgcaattccgtcatatcacccttttctgccgcttcaatcgcccgttgcgccaaccagttgcgcaataccagagcggggttaacgctttgcatcagttgctgacgctcactatcgctaacctcgtcttgttgcaaacgcccccgataacgggcaaaccagtcatcaaatgccgcacgatcaataaactcatcacgtagcggactcgccgcgctgtgctgctcggtcagactcagcatgcggaatgtgcgggtataatcgctgcgctctcgcgccatcagactgaataattcattcagtagcgcgttatcctctttttgctccgtcatgaagcccagtttctgccgcatccgttctccataatgcgtcaacaaaacctgctgatagctgtccagggcctcattcagggcatctacggcaacaaatgggctcaatgtctgcgccagacgctgtaaattccacaacgcgacggcaggttgattatcaaagctgtaacgcccttgatgatcgctgtgattacaaataaaaccgggttcgtaatcatcaagaaaaccaaacggcccgtaatcaagcgtcagccccagcaggctcatgttgtcggtattcatcaccccatgagcaaagccgaccgtctgccattgggcaattaagctcgcggtacgtgcgacaacatcgctaaaccagagacggtatttgtcctcatcatctgcaagatgactccagtaatgacgaatagcaaagtcagctaactgacgaaccttttcgctctcgcggcggtagtaaaaatgttcgaaatgaccaaagcgcagatgacttggtgccacacgcatcagcatcgcgcctggctccgccgtttcccgatacactgggctatcgctggtgacgatacttaacgcgcgggtcgtcggaatgcccagataatgcatcgcctcactggcgagactttctcgtatcgtgctacgtaaaaccgcccgtccatcacccattcggctataaggcgtcaggccagcacctttcagatgccagtccattgtagtgccatcagcaagcagttgttcgccgagtaaaatgccgcgcccatcacccagttggcccgcccagacgccgaactgatgaccactgtaaacctgcgccagtggactcataccaggcagtagggcttcgccgccccagacacctgcgccatttttaaacaggctgcttggaatactcagcgtgttagccagttcggtattatgccaaatcagccgggcattatttaaaggcgtaggggaaagtgctgtataggtttctggcaattcatcgcgccagcgggtaacaaaagacagggtcatagatcctcctgtttgatagtgtagacggttactctcgtcttaaacaccagcaaacagaagggttatcgctgaaccaacgtcgttatctgatttatgggaacggcaggccacaggcatccctggagagcatggaaatcgaagggggtaatctgtgccaatatttctgccgtatcaatgcctcccgcaatgatgcaattgcaacaaggggaaatttgcgcctggatcgcacgaataaacggttcgaaggagcggtgcgtgatttgttgctgaataaaacttttatccagcatgacgcgggtgaaaagaccatcaaaaaccgctttcattgtgctattgcctgctcccaaattacctaacacaaggggatacacttggcttaaggataaaagaccgcgattatcttttccttcattgagatgcgggtaattctcattaatcaacagttcaataaacggatattttaatagttcgcctgcgtaattatccctctctaataataatgtagccacttgtggcgttaaattaagccaggcaaagagtttatgttgaataaaaaaatgttggcaactttttagtaattccaactgctcactaaataattgccaatgttgctcctcggtaagttgcgctataacccgactcgtcgggatacgaaccgtaccatcttcactggagaaatgggtaattaactcaacgccgacaaggacttgctggttgtctcttatcggcaggaaatagcaatcagaatgataaagattctccaaaaaaatcttcatggtaaccgtccctctcgaaggatgtttttcagtatccggctaaaagggatgaggccataagacataacaattacagaaggagtaactttcatttgttccatgttaaccactttttcaggggtcctttttttagattatcctgattataaacgaataatccatttacggaatttttgtctgcaaaatactactgtattcaggagtaaatggacggcgatgtatcatcgccgtccatttttcgacatattagattcgtctcgcctgccagaaatttttctgccaatagacattatcaagactggaacgcatcactcccttgctggtagaggcgtggataaattggttgttggtatcgtaaatacctacatgcaaaccattttgtccggaccccgttttgaaaaagaccaggtcacctggcagcaactcgtctttatcaatttgcgtgccaatagaggcttgttgtttggtttcacggggcagctgcaaatcgaaacgatcgcgcatcgtcacaaccacaaatccgctacagtccacaccgcgccgcgtcatgccaccataacgatacggcgtgccatgccagctttgtagctggtcgttcaaaccggcaataacggtaatgctatcagaaagtctggcatttggcggcggtgctttatggtggctacacccggccagaagcagtgctgtgatcaaaataaggcagaaacgcattccgtacggttcctctgttttttattcttgcattaatttagcgtcgtaattacccgattttcaagatactaatgaaatcagatggtgctaatcagcattctgtgaccttcgatatccagacggcgaaaattcatcccataggcctgcgccagatttggcggcgtgagcacctcttccctgcgtccactggccagcatttttccaccttttagcaaccacgcccgatgcgcatgacgcaatgtgtggttgagatcgtgactgctcatcacaatcgccagtccttgctgacacagcgcgctcagaattttgtctaacgcactttgttgcgcaacatcaagactgttcatcggctcatcaagaagcagcaattggcctgcgggattggcttgtggtgtgatttgcaacaccaccgcagcaagacgtacgcgttgccattcaccgccggaaagttgattggtgctacgtccgagtttgtcatcaagagccagcgcccctgcgacatcattcagtagttcggtacgcgttttatcgtgctgatgcagtgtcaggtagtgccagaccggcgttgcaaacggcggcgtctgctgttgactaagataggcgcgatgcagcgcgagttttgttgcggaccatgcttccagtggttgccccgcgaactgaatgcttcccttaccgctggtcattccggccattcgcgccagtaaggtactcttacccgcgccattcggccccaccaggtgcaggatctccccagcccgaacctcgccagaaagcggccccaggcgggtagattccgcaacatcttgtaactgcatcacaatagacattattttgccaacgccagtttaatgctttccatcacaatgggatcttccggcgtcatatccggggaaaaacgctggatgacttttccgtccctgccaaccaggaatttttcaaaattccataaaatatcatccgggtacagcggtgcacggcctttgctgaccatacgggcatagaatccgctctcttccggcgcgactgcggtcggcgctgcggcaatcaatttttgatacagcggatggcgtccttcgccattaacttcaatcttactgaacatcgggaacgtcaccccccatgtggtggtacagtaagttttaatctcttcatcgctgcccggttcttgttccagaaactggttgcacgggaatcccagcaccataaaacctcgatcgacccaggctttctgaatattctccaactgctcatattgcggcgttaagccacacttactggcgacattgacaatcaacagcacattaccggcgaacttctccagcgtggtcacttcaccgtcgatatctttcactacggtcgtcagaatggaatcttgcatcgtttctcctgggtgtggtcagtaaaaatcttagcttttaatcatagaccgtctttttgcggttaacgtcctgcttttaacaataaccagataaacaccggcgcacctaacgttgcggtgaccacgccaataggcagctctgcggcagctaatgccaggcgcgctacaatatcggccagcagcaatgcgctcgcccctgccagcgcgcagccgggaagtaatacgcgatgatcggttaaaccacacaaccggagaatatgggggatcaccagaccaataaagccgatagcacccgccagcgccacactgacgccaaccatccagccggtcgctgccaccagcacattgcgccagaaccacaggggtaaacccagttgccgcgcgctgatctcgccaagtgctaacatattcatcggcctggactgacaacagatccacaacaacacggggatcaatgccagcatcagccagctttgccgccagtctacgccgccaaaaccgcccatcatccagtacatcagctgacgcaaatcaacactggtggaaaagtagatagcccacgtcattagtgcgctacagataatccctaatgcaacgccagccagcaataaccgactggtgctaagatgacgacgggcgaaacgtaagagtattaaagtgatgataagcgcgccagcaatcgcacacagccctagcgcccagttggggagttgcccttgcccaagcaataccgcggcgataagccccacgcctgcgccgttagagacgccaagtagtccaggttctgccagaggattttcaaacaacgcctgcattacagcgccggatatagccagcgccgcaccaaccagcaatacagccagcgtacgtggcaggcgaatttgccagacgaacagttcgccacgaggagtaaaccagtcacctgggctgatccattgttcaccggcgcaaaggcttaagagaagcgccagcagcatcaaaacactcaggcataataaccagcgaatattttgtcgctgttgttggcgggcaagtgtcagcatggtatccgttctgctgaagtgtcatggcgttgattttacggtgactcttcgacagtgaaaagaaaaaaggccgcagagcggcctttttagttagatcagattactcgtctttggggctagcgttttcgacccggctttttaacttctgcccgggtctgaaggtcaccacgcgccgtgctgtaatgggaatatcctcgcccgttttcgggttacgtcccgggcgttgattcttatcacgcagatcgaagttaccaaaaccagagagtttcacctgttcgccgttttccagagcgcgacggatctcttcgaaaaacagttcaaccagttctttggcatcccgcttgctaagcccaagcttatcaaacagatattcactcatttcagcttttgtaagcgccataggttcaatccctcaaacttgcctggaatcgctcttttaatgcctctacacatttggcgacggtagcggcaatctcctcttcttcgagtgtacggctggtatcttgcaggatcaggcttatggcgaggctcttatacccctccgcaacacccttaccgcggtacacgtcaaataagtttacgccaactacctgatttacgccaactttcttacattcggataaaatatccgctgcgggaacgttttctgcgaccaccaccgcgatgtcacgacggttcgccgggaagcgagaaatctcgcgcgcctgaggcaccacgcggtctgcgagcttgttccactccagttcgaacaccagagtgcgaccgttaagatccagtttacgttccagttcaggatgaacaaccccaacaaaaccaatacgttcacctttcagataaatcgctgcggattgccccggatgcagtgccggattcgcttctgcacggaactcaacctcattcagtttaccggtcaggtcgagaacggattcaagatcgcctttcaaatcatagaaatcaacggtctcttttgccaggttccagtgctcttcgtaacggttaccgcaaatcacaccggctaacatcagatcctgacgaatgcccaacggtgcctgagtatctggtacgaaacgcagaccgctttcgaaaatgcgcacacggttctgctgacggttctggttgtacaccacggttgccagcaggccagtccacagagaaagacgcattgcactcatttcaacagagatcgggcttggcagcagtaaggcttcaacgcctggatggatcatctgctgcactttcggatcaacgaagctgtaggtgatcacttcctgatagcctttgtcgttgagcagcgttttcacgcgcttgaggctcaggtcagcttcacggtgagtacccataatcaggcttgcctgtaccggctcatccgggatgttgttgtagccgtaaacacgcgcgacttcttcaaccagatcttcttcaatctccatatcgaaacgccagctcggcgcaactgcctgccattcgtctttgccttcggtcacttcgcagccgagacgacgcagaatgtcagttacctgctcatccgcaatatgatggccgatcaggcgatccagtttgctacgacgtagagtgatggttgcacgcttcggcagcgttgcttcgttggtgatatcaattaccgggccagcctcaccaccgcagatgtcgatcagcagacgggtcgcacgttccatcgctttgtgctgcagtgccggatcaacgccacgctcataacggtgagacgcatcggtatgcaggccatgacgacgagcacgaccggtgatagacagcgggctaaagaacgcgcattccagcagcacgttttgtgtttcgtcattcacgccagagtgttcgccaccgaagatgccgcccatcgccagcgccttgttgtggtcggcgatgaccagagtgtcagcattcagcttcgcttcagtaccgtcgagcagcaccagcgtttcgccctctttcgccatccgcaccacaatgccgccttcaatgcgatctttatcgaaagcgtgcatcggctggcccagttcgagcagcacatagttggtgacgtcaacaactgcatcgatagaacggatcccgcaacgacgcagtttttctttcatccacagcggagttggcgctttaacgttaatgccttttaccacacggccaagataacgcgggcaggcttccggcgcttcgactgtaatcggcagcgtgtcgtcgatggtcgcaccaaccggaacgatttccggttgaaccagcggcagctggttcagcacggcaacgtcacgcgcaacaccaatgatgcctaagcagtcggcacggtttggcgtcacgctgatttcgatggtgttgtcatcaagtttcaggtattcacggatatcggtgccaatcggcgcatccgcaggcagttcgataatgccgctgtgatcgtcagaaatgcccagttcagagaaggagcacagcatcccttcagacggttcgccacgcagtttcgccgctttaattttgaaatcacccggcagaacagcaccaatggtcgctaccgctacacgcaggccctgacggcagtttggcgcaccgcagacgatgtccagcaggcgatcgccgccgacattcacttttgtcacacgcagtttgtcagcgttcggatgctgcgcacactcaaccacttcaccaacgaccacgccgtggaagctgccggcaaccggttctacaccgtcaacttccaggcccgccatagtgatttgatttgccagcgcatcgctatcaatcgccgggttcacccattcgcgtaaccacagttcactgaatttcataatctattcctgccttatttaaactgtttgaggaaacgcagatcgttttcgaagaaactacgcaggtcggtgacgccgtaacgcaacatagtcagacgctccatccccatcccgaaggcgaaaccagagtaaacttccgggtcgatgccaacgttacgcaacacgttcggatgcaccatcccgcagcccagcacttccagccatttaccgtttttacccatgacgtccacttctgcagaaggttcggtaaacgggaagtaggaaggacggaagcgaatctgcaaatcttcctcaaagaagttacgcaggaagtcgtgcagcgtgcctttcaggttggtaaagctgatgttggtatcaacaatcagaccttccatctgatggaacatcggcgtgtgagtctggtcgtagtcgttacgataaacacggccaggcgcgatgatacgaatcggtggctgctgggctttcatggtgcggatctgtacgccagaggtctgggtacgcagcaggcgggtagtgtcaaaccagaaagtgtcgtggtcagcgcgcgccgggtggtgaccaggaatgttcagagcatcgaagttatgataatcgtcttcgatttccggcccggttgccacggtaaagccaagctcaccgaagaaactttcgatacggtcgatggtacgggtaaccggatgcagaccgccgttttcaatgcgacgacctggcagagagacatcaatcgtttccgccgccagacgcgcattcagtgcagcgctttccagttccgctttacgcgcattcagcgcctgctgaacctgctctttcgcttcgttgataaccgcaccagctgccggacgctcttctggcggcagctcacgcagggtcgtcatctgaagggttaagtgcccttttttacccaaatattcgacgcgcacattatctaacgcggcaacatcactcgcctggctaatggccgccttcgcactggcaaccagttctgcgagatgactcatggttttcctcattgtgtcagtggtgacactggttcgttggacttagagcctatcccatcaggctattttacttgccattttggtcccgggctgtgctcgaaattctcacgtacttaaatacgctccggtttctccgcgctggccgtgtccagtctggctgcgacaattacacctgatgagacaggctttttatttttcaaaacgcgcatacaaaaaaagcctccactgggaggctttcaggcgctgttttccgtttctcttctcacgcgctagcctcctggattcaggtgctaaagtaaaaaaagaagcggaaaatagcagcattcattgcttgcgttaccttttggtactcttcaaaagacctttattgaaaaggctacggcgataaaagtcaatgttttgatggcgttgaaacgaaaagagggagactagctccctctttcaactggcttatgccagagctgctttcgctttttcaaccagagcggtgaacgctactttgtcgaatactgcgatatcagccaggatcttacggtcgatttcaacagaggcttttttcaggccattgatgaatttgctgtaagaaataccgttctgacgtgctgctgcgttgatacgcgcaatccacagttgacggaactgacgcttacgttgacgacggtcacggtaagcatactgaccagctttgataacagcctggaaggcaacgcggtatacgcgagaacgcgcaccgtagtagcctttagcttgtttcaaaattttcttgtgacgtgcacgtgcaataacaccacgttttacgcgagccatatgtgctctcctgtatctatattctaattaaaaagttaaaaacgttaacggcttatgcgtacggcaggcacgcgattaccaggcccagatcgcctttggaaaccatggctttcggacgcaggtgacgtttacgtttggtcgcttttttggtcagaatgtgacgcaggttagcgtgcttgtgcttaaaaccacctttaccggtttttttgaagcgcttagcagcaccgcgtacggtcttaatttttggcattttaataacttccacttcgcattgttaataaacgaaacaaaggcgaacaaagcctgtgaagcccgaaggctccacagacagtgctacttgaaggccttactgtttcttcttaggagcgagcaccatgatcatctggcggccttcgatcttcgttgggaaggattcgaccactgccagttcttgcaaatcgtctttcacgcgattaagcacttccataccgatttgctggtgcgccatctcacgaccgcggaaacgcagcgtgattttggctttatcaccctcttcgagaaagcgaatcaggctgcggagttttacctgatagtcgccttcatctgtaccaggacggaatttaatttccttaacctggataactttttgctttttcttctgttccttagaagacttgctcttttcatagaggaatttgccgtaatccattatacgacaaaccggcggctcggcgttagggctgatctcgactaagtctactccggcttcttctgctttctccagagcttctctcagactcacaataccaagctgctcgccttccagacctgttaagcgaacttcctgggcgcgaatttcgccattgatacggttagggcgcgccgtttgaactcgttttccgcctttaataccttattcctccaattgtttaagactgcggctgcgaatctcttgttgcagcttctcgatcacttcatttacgtccatgcttcccaggtctttaccacggcgggtgcgaacggcaactttgccactttccacctctttatcaccacagaccagcatatatgggacgcgacgcaaagtgtgctcgcggattttaaagccaatcttctcatttctcaagtctgctttaacacgaatgcccgcattacttagtttttgcgtcaattcgttaacgtattcagactgactatcggtaatattcatgataacaacctgaaccggcgcaagccaggtcgggaagaaaccagcgaactcttcggtcaggataccgatgaaacgttccatgctccccagaattgcgcggtgaatcattaccggtactttacgttcattgtcttcgcctacataagaagcgctcagacgagacggcaaagagaagtccagctgtactgtaccgcactgccatgcacgatcgaggcagtcatacagggtaaattcaattttcggaccgtagaaagcgccttcacccagttgatattcaaacgggatgttgttttcttccagcgcaaccgccaggtccgcctcagcacgatcccacatttcgtcgctgccaatacgtttttcaggacgagtggagagtttgacgacgatcttctcgaagccaaaagtgctgtacatatcatagactaaacggatacatccgttaacttcatcgcgaatttgttcttcagtacagaagatatgcgcgtcatcctgggtaaatccacgcacgcgcatcaggccatgcaggctaccactcggctcgttacggtggcagctaccaaactcggccatacgcagcggcagatcgcgataagacttcagcccctggttgaaaatttgtacgtgacccgggcagttcatcggcttaatgcagtattcacggttctcagaagatgtggtgaacattgcatctttgtagttgtcccagtgaccggttttttcccacaggacacggtccatcatgaacggacctttaacttcctgatactggtactctttcagtttagaacgaacaaacacttccagttcacggaagatggtccagccgtcgttgtgccagaataccatacccggcgcttcttcctgcatatggtacaggtcgagctgtttaccgattttacggtggtcgcgtttcgcggcttcttccaggcgctgcaggtaagcgttaagtgcttttttgtctgcccacgccgtaccgtaaatacgttgcaacattttgttgttgctgtcgccacgccagtaagcccctgccgttttcattagtttgaaatgatggcagaaacgcatgttcggtacgtgcggaccgcggcacatatcgacatattcttcatggaagtacagacctggcttgtcatcatgggcgatgttttcgtcaagaatggagactttgtagctctccccacggttggcgaaagtttcacgcgcttcgtgccagctgactttcttcttaatgacgtcgtagtttttctcagcaagctcatgcatccgcttctcgagtgcttcgacatcttcctgggttaacgtgcggtcaagatcaacgtcgtaataaaaaccgttgtcaataaccgggccgattgccattttggtatgcggccaaagttgtttaatcgcgtgccctaacaggtgcgcacaggagtgacgaatgatctccagaccttcttcgtctttggcggtaatgatgctcagttgtgcgtcgttttcaatcagatcgcaagcatcaaccagttcgccattaacgcgccctgcgatacaggctttcgccagacctggaccaatgtccagcgcaacatccatggggcttacagcgtgatcgtaatggcgttggctgccatcaggaagagttataacaggcattttatatccttatttgcagtggtgacccacacgaaagatcacatacaaagaaaaatttgtttattaacagttcattgcgaaaccatctagccaacaaatgctaaattggttcgcaatcaggtacacaaatgaaagacattaacctctcaccttccacccggttgagcgatgttaacactaaaaaaagggagattgtacctttccgtttcacattgattcgattcgcaattcgtttgtagtgagtacaccagcaaaacgcttaaagaacaactgataacatcacggtgcgtctgaaaggtttactgcgagcggatttacagcagcataaactgaatccagcaaagttcgttgcgtgatttggcggtagtattttaaacgctcatgagattaatgacgaagtggtcatatcacaatgataaaagtgacacaattcttataacaatttttcgtgcacatttcgttctggcgataataattaatcatcatcctcaaaacctccagatatatataaggcgaacagattatgagtcaaaacgatatcattatcagaactcattataagtctcctcatagattgcacatcgatagcgacataccaacaccttcatcagagcctattaatcaatttgcgcgccagctcatcaccctacttgatacctctgacttaagttcgatgctgtcatactgtgttactcaggaatttaccgcaaactgtcgaaaaatatcacaaaattgttattccactgccctttttaccattaactttgccacttcacccatccatacagaaaatatactcattacattacactataaaaaagaaatcatttccttattactggaaaccacgcctattaaagctaaccatttgcgaagcatactggattatattgaacaggaacagttaactgctgaagatcgtaaccattgtatgaaactgtctaaaaaaatccatagagaaaaaaactatacacccaacagtaaatctcaatggtagtgcatgttttttgcaatctccttctgacgctattttttgtcgccatctgtcattgcaatacgcccttgattcattgagaaatggaaaaggcaaagtcaacctgattaaacattactcctccgttgaatccatacagcagcatgtccccttagtccgggacgcggagttcagagcattacttcgccatcctcctgcagggagtcgcgttatcgcgagtaaggattttggcttcgctttagatattttcttttgtcgaatgatggcaaacaatgtcagtcatatgtccgcgattttatatatagacaatcatactttgtcagtaaggctacgaataaagcagtcagtgtatggacaattaaattatgttgtgtccgtttacgacccgaacgataccaacgttgccgtcagagacacccacaggacagcacggggctttctttcgcttgataagttcatcagttcaggtcccgatgctcagacctgggctgatagatatgttcgcaactgtgcaattgctattctgcccctattacctgtgggagttccaggggctattttcgcgggtattgcatcacgaatgccatttgcccctatacatccatcggcaatgttgttaataatggctacaggccagtctcaacagcttattacattattcaaacagttgcccatactccctgaaaaagaaatcattgaaataataactgcgcagaatagcgttggtacacctgctttatttttggctatgatgaacggacatactgacaacgtgaaaatatttatgcaagaaattcagtcactggtagataatcacatcattcatgaagataatctggttaaattactgcaaactaaaagtgctaacgaaacacctggactttatatctccatgttgtatggattcgatgaaataatcgatatctttctgaatgcattaaccactccaatagcacaagagcttttaaacaaaaaactggtgatgagtattttagccatgaaaatacatgatggtgagccaggattatacgccgcaatggaaaataatcaccctttgtgtgtcacacggttcctctctaaaattaatggcatcgcctttaaatacaagttgagcaaagctaacatcatggatttattaaaaggagctacagcacagggaacccctgcattatacatcgccatgagcaagggtaatgaagacgtcgtgttatcttatatatcgacgctgggtgcttttgcaaaaaaacattcttttagtcaacatcagttatttacactattggccgctaaaaatcatgacaacatgtcagctgttcatatagccattcatcataagcattataaaactgtagaaacatattatgctgctattaatgcaatcagccaaagcctgagttttagtgctgatgaaataaagacgtatttataaccagctatttacgatatatatcgatacataattttatttttttcataaaacgcagaaacagtgaccatgtgcacaacgccacccgacggctgtaataacaaaaaatcccttgatgcctgtcccttttgttacactccgttatcacgcacaagagatatgcaggacactggtatgccgactaaacgctttgataaaaaacactggaagatggtggtggtgctactggcaatctgtggcgctatgttgttgctacgttgggcagcaatgatttggggctgagcagtgacaaacgaagacagccagaccgcataacacggtccggcagataattttacatgctgtagcccaggcttaaggttgtccgacggtcggtatgttccggtgcagactctggaggttcagagttccatgtgacgttgtaagccaccttcagtccaaaatgttcattaatagcaacatttaatgcgctttcggagttcagcgttgtgtcttccgcgccaaagacgctaacaccctgcgtaaatttagcgttgtcagtcaactgccatgcataagccccggaggcatagcccagcggctgggtttcactggcattgtcggtatatttgtcgtaacgcacacctggaccgaattcaaagcggaaactgtgtaccgggccattcaaaaactgacgaccataacccgcggtcaacacatcgcgctctcgatagccgttataacggtctgtcagccagcttgcctgaccaaataaatagtcataatcagttaaattaaaacggctacgcccgcccgccgcatatttttcactagaacgctcatcattagaagaagtattactggcgttcccccacaggctccaggcagtggtgtgtccataccaggtcatggtggtgtcagccgtaagactggagcttttcgtattgccactttgtgcaagatatcctgcgttcagattaccttcgaaaggttttttagcgctggcaggatcatccatgacagtaaaaacggaatcatcggcagctgcattcagactcgcaaacatgccccccgccaacataacgatggcaggaactgtcttcaaaagcttcatttatcaagagtccgtacaacaaaaaaagagaccatcgcggtcccggaaactttcttaaggatcaaagattagcgtccctggaaaggtaacgaattataaaaaggcgcgaataacttagcaatgtattcttatttcattttttgaataagcatgtggcgaaaacagatttttatttatatatatttatctgcaaaattttaaataaagctccaataaatcatattgttaatttcttcactttccgctgattcggtgccagactgaaatcagcctataggaggaaatgatggtacgtatctatacgttgacacttgcgccctctctcgatagcgcaacaattaccccgcaaatttatcccgaaggaaaactgcgctgtaccgcaccggtgttcgaacccgggggcggcggcatcaacgtcgcccgcgccattgcccatcttggaggcagtgccacagcgatcttcccggcgggtggcgcgaccggcgaacacctggttagtctgttggcggatgaaaatgtccccgtcgctactgtagaagccaaagactggacccggcagaatttacacgtacatgtggaagcaagcggtgagcagtatcgttttgttatgccaggcgcggcattaaatgaagatgagtttcgccagcttgaagagcaagttctggaaattgaatccggggccatcctggtcataagcggaagcctgccgccaggtgtgaagctggaaaaattaacccaactgatttccgctgcgcaaaaacaagggatccgctgcatcgtcgacagttctggcgaagcgttaagtgcagcactggcaattggtaacatcgagttggttaagcctaaccaaaaagaactcagtgcgctggtgaatcgcgaactcacccagccggacgatgtccgcaaagccgcgcaggaaatcgttaatagcggcaaggccaaacgggttgtcgtttccctgggtccacaaggagcgctgggtgttgatagtgaaaactgtattcaggtggtgccaccaccggtgaaaagccagagtaccgttggcgctggtgacagcatggtcggcgcgatgacactgaaactggcagaaaatgcctctcttgaagagatggttcgttttggcgtagctgcggggagtgcagccacactcaatcagggaacacgtctgtgctcccatgacgatacgcaaaaaatttacgcttacctttcccgctaacaaaaacattcccccagcattgggggaatcatcaccaacctgtcggcaacgcgtttctccgactatgctcaaaagtcatgtgataacaaaggggtgaactatggccagtggcgatcttgtccgttatgtcataaccgtcatgttgcatgaggatacattgactgaaattaacgagttgaataattacctgactcgcgacggttttttgctcactatgacggatgatgagggaaatatccatgagctgggaactaacacttttggacttatcagtacccaaagtgaagaagaaattagagaactggttagcgggcttacccaaagtgcaaccggcaaagatcctgaaatcaccatcacgacctgggaggaatggaatagcaacagaaaataaatggtttttgggcaataatcagtctgtggtgtgcgttagctcgtgtttttacaccgcattcttgcgctaaccttatgatctggcagacaacatgggagagacatcatgtggcaggcaatcagtcgtcttttgagcgagcagttaggtgaaggcgaaatcgaactgcgtaatgaactgcctggcggagaagtccatgccgcatggcatttgcgctatgcaggacatgattttttcgtcaaatgtgatgaaagggaactgcttcccggttttaccgccgaagccgaccaactggagttactgagccgtagtaaaaccgtcaccgtgcctaaggtttgggcagttggcgctgaccgtgactacagttttctggtgatggattatctcccacctcgtccgctggatgcgcatagcgcatttattcttggtcagcaaattgcgcgtttacatcaatggagcgaccaaccacaatttggccttgatttcgataacgcgctctccacaactccacagcccaacacctggcaacgtcgctggagtacgttttttgctgaacaacggattggctggcagttggaactggctgcagaaaaagggatcgctttcggcaatatcgacgccatcgtcgagcatattcagcagcgtctggccagtcatcaaccgcagccttctctgttgcacggcgatttatggtccggcaactgtgcactgggtccggatggcccgtacattttcgacccggcctgctactggggtgaccgagagtgcgacctggcgatgttaccgctgcatactgaacagccgccacaaatctatgacggctatcagagtgtatccccgctacctgccgatttccttgaacgtcaaccggtttaccaactctacacgctgttaaatcgtgcaaggttatttggcggtcagcatttggttattgctcagcagagtttggatagattattagcagcatgatatgggttgaggataatggccgctccgtgcggccttttgattaaataaacccaagcagagaaaagaacacataacctgcagcaatacaaataaccggcaggatatacagactgaaaaactgcaggaaaatagtatggtgcggaacaacaatacgggactcaatttgttcacgcgttagcccctcttcccctttggctttttccagaatgagttgatcttcaacaccttcccgcaagaagcgcgcctggcgactcatccgggcaccggaatcctgcaacgccagtccgacaaaaatcaggatgaaaatcacccagaacataacgttcacgccaccattaaaattgggcgtcggggagttataccagaatagattcaaaaaaggcgtattcgcctgcatcatatcgatcatgacatgagtaaagtcgagcatgaccgcattaatgccttccttgttttcctgccgggtattcataaatttcagcaaagaaatcaatgtagagatcaatgcaggtataaaaatcacccaacccaaaatccttttcaaaacagcaatgcgtccagcttgttgatacgtcatgagttctccttgattaagacgcgtcgtttcacttagtttacctgtagatatctgttttcgcccattctttaaaggcgatatgataggcgcttaatcataagcacggcttaataccttacacataatgctctaaaggagaggttgtaatgagtaccccgcgtcagattcttgctgcaatttttgatatggatggattacttatcgacagtgaacctttatgggatcgagccgaactggatgtgatggcaagcctgggggtggatatctcccgtcgtaacgagctgccggacaccttaggtttacgcatcgatatggtggtcgatctttggtacgcccggcaaccgtggaatgggccaagccgtcaggaagtagtagaacgggttattgcccgtgccattagtctggttgaagagacacgtccattattaccaggcgtgcgcgaagccgttgcgttatgcaaagaacaaggtttattggtgggactggcctccgcgagtccactacatatgctggaaaaagtgttgaccatgtttgacttacgcgacagtttcgatgccctcgccagcgccgaaaaactgccttacagcaagccgcatccgcaagtatatctcgactgcgcagcaaaactgggcgttgaccctctgacctgcgtagcgctggaagatagcgtaaatggcatgatcgcctctaaagcagcccgcatgcgttccatcgtcgttcctgcgccagaagcgcaaaatgatccacgttttgtattagcagacgtcaaacttagtagcctgacagaactcaccgcaaaagaccttctcggttaatgaccaggggcagtgatctcgctgcccctggttctttatctgaaattgcattcaactgacggattaatcgtcaatttaagagaaagagttacaccgtcaccacttccgtgcactgtataaaaatcctatactgtacgtatcgacagtttagtgagttttatcatgacggcggaaggtcaccttctcttttctattgcttgtgcggtatttgccaaaaatgccgagctgacgcccgtgctggcacagggtgactggtggcatattgtcccttccgcaatcctgacgtgtttgttaccggacatcgatcacccaaagagctttcttgggcagcgattaaaatggataagtaaaccgatcgcccgcgcttttgggcatcgtggttttacccacagtctgctggcggtatttgcgctgctggcaaccttttaccttaaggttccggaaggctggttcattccggctgatgcgctacaaggaatggtgctgggttatttgagccacatacttgccgatatgctgacacccgccggtgttcccctgctctggccatgccgctggcgtttccgcttgcctatcctggttccccaaaagggcaaccaactggaacgttttatctgcatggcattatttgtctggagcgtatggatgccccatagtttacccgagaacagcgctgttcgttggagtagccaaatgatcaataccttgcagatccagtttcatcggcttattaagcatcaggttgaatactaaaaaggcaaaaatcacctttctggaataagcaattccatttgaatataagagccagctcacagttctgttaatcttgcgccaacactatgactgctacgcagtgatagaaataataagatcaggagaacggggatgaactttccattaattgcgaacatcgtggtgttcgttgtactgctgtttgcgctggctcagacccgccataaacagtggagtctggcgaaaaaagtgctggtgggtctggtgatgggtgtggtttttggccttgccctgcataccatttatggttctgacagccaggtacttaaagattctgtacagtggtttaacatcgttggtaacggctatgttcaactgctgcaaatgatcgttatgccgttagtcttcgcctctattctgagcgcggttgcccgtctgcataacgcatctcagttaggcaaaatcagttttctgaccatcggtacgcttttgtttaccacgctgattgcggcgctggtcggtgtgctggtcaccaacctgtttggtttgacggctgaaggtctggttcagggtggtgcagaaactgcacgtctgaacgccattgaaagtaactatgttggtaaagtctctgatctgagcgttccgcagctggtcttgtcctttatcccgaaaaacccgtttgccgatcttaccggagccaatccgacgagtattatcagcgtggtaatttttgccgcattcctcggcgtagctgcattgaaactgctgaaggatgatgcgccgaaaggtgaacgcgtcttagccgctatcgataccctacaaagctgggtgatgaaactggttcgcctggtcatgcagttgaccccttacggcgttctggctctaatgaccaaagtggttgcaggttctaacttgcaagacatcatcaaactgggaagtttcgttgtcgcgtcctacctcggtctgctgattatgtttgcagtgcatggcattctgctgggcattaatggcgtgagtccgctgaagtacttccgtaaggtatggcctgtgctgacgtttgcctttaccagccgttccagtgctgcgtctatcccactgaatgtggaagcacaaacgcgtcgtctgggcgttcctgaatccatcgccagtttcgccgcctctttcggtgcaaccattggtcagaacggctgcgccggtttgtatccggcaatgctggcggtgatggttgcgcctacggttggcattaacccgctggacccgatgtggattgcgacgctggtcggtattgttaccgttagttccgcaggcgttgccggtgtcggtggtggtgcaactttcgccgcactgattgtactgcctgcgatgggcctgccagtaaccctggtggcgctgttaatctccgttgaaccgcttatcgacatgggccgtacggcgttaaacgttagtggcagcatgacagctggcacgctgaccagccagtggctgaagcaaaccgataaagccattctggatagcgaagacgacgccgaactggcacaccattaattcttatgctggcaacggtccgttttgtataggggccgttgccttactttttaaatgttccatcgcggcgatgcatacactctcatatttaaacagatcgtcagcgaaaaaaatgtccaacttatcaatacattcctggctcaaactatgtgcctgtaggctgaagcttaaaacctcatacccgagacgttttctaagactactatctggaatactcataatatcttcaagcacaccacttcccattcccggaagatttagtggattaaaaagaagattgatattaagcatacttattatgctaggaaactttaggagactctcatttttttgaatcgcagcaaaaatgctcccgacaggatgtatataattttgttcatagtatatagtccttaaatagtgaataaccaacctgttttttatactgatcaaattggtcattttttctgggcgaaatacagaagtgacatccattccaataaaatctttatttatacctcttatccgaatttcactaccataaagattattaattattactctatatttaacattgtcctgcagatatgtatcaaaactaagtgctggcgctcctggcttactggcatcatagttaatgttagacatataggcaatcatataattaaagttactttctgctatttcatcgcagtcacattgacccgtacttataaagaaagtgagtgctgtcatagtagactgcagcctttctttaaaagagtcgaaagccaggcttttaatatttaaatcaccataattactctgtattaagtttgtagaaaacatctcccgcctcatattgttaacaaaattattatctcatttaaatctaagtcatttacaatataagtttaagagcgacgccacaggatgaactatcaaaaatagctcatcatgattagcaaaacttaaccattttaaaataaataaacaattaaagaaaaaagatcacttatttatagcaatagatcgtcaaaggcagctttttgttacaggtggtttgaatgaatgtagcaacgaaatacagaatttcaggtcatgtaactcccggcaaaaccgggaggtatgtaatccttactcagtcacttccccttcctggcggatctgatttgcccaacgttgggcagattcaggcacagtaaacgccggactgcgcagaaaactctctcccatcagtacaaacgcaacatatttgccacgcagcatccagacatcacgaaagctatccatctttatcgcatgttctggcggcgcgggttccgtgcgtgggacatagctaataatctggcggttttgctggcggagcggtttcttcattactggcttcactaaacgcatattaaaaatcagaaaaactgtagtttagccgatttagcccctgtacgtcccgctttgcgtgtatttcataacaccgtttccagaatagtctccgaagcgggatctggctggtggtctatagttagagagttttttgaccaaaacagcggccctttcagtaataaattaaggagacgagttcaatgagccaacataacgaaaagaacccacatcagcaccagagtccactacacgattccagcgaagcgaaaccggggatggacagtctggcacctgaggacggctctcatcgtccagcggctgaaccaacaccgccaggtgcacaacctaccgccccagggagcctgaaagcccctgatacgcgtaacgaaaaacttaattctctggaagacgtacgcaaaggcagtgaaaattatgcgctgaccactaatcagggcgtgcgcatcgccgacgatcaaaacagtctgcgtgccggtagccgtggtccaacgctgctggaagattttattctgcgcgagaaaatcacccactttgaccatgagcgcattccggaacgtattgttcatgcacgcggaagtgccgctcacggttatttccagccatataaaagcttaagcgatattaccaaagcggatttcctcagtgatccgaacaaaatcaccccagtatttgtacgtttctctaccgttcagggtggtgctggctctgctgataccgtgcgtgatatccgtggctttgccaccaagttctataccgaagagggtatttttgacctcgttggcaataacacgccaatcttctttatccaggatgcgcataaattccccgattttgttcatgcggtaaaaccagaaccgcactgggcaattccacaagggcaaagtgcccacgatactttctgggattatgtttctctgcaacctgaaactctgcacaacgtgatgtgggcgatgagcgatcgcggcatcccccgcagttaccgcaccatggaaggcttcggtattcacaccttccgcctgattaatgccgaagggaaggcaacgtttgtacgtttccactggaaaccactggcaggtaaagccagtctcgtttgggatgaagcacaaaaactcaccggacgtgacccggacttccaccgccgcgagttgtgggaagccattgaagcaggcgattttccggaatacgaactgggcttccagttgattcctgaagaagatgaattcaagttcgacttcgatcttctcgatccaaccaaacttatcccggaagaactggtgcccgttcagcgtgtcggcaaaatggtgctcaatcgcaacccggataacttctttgctgaaaacgaacaggcggctttccatcctgggcatatcgtgccgggactggacttcaccaacgatccgctgttgcagggacgtttgttctcctataccgatacacaaatcagtcgtcttggtgggccgaatttccatgagattccgattaaccgtccgacctgcccttaccataatttccagcgtgacggcatgcatcgcatggggatcgacactaacccggcgaattacgaaccgaacagcattaacgataactggccgcgcgaaacaccgccggggccgaaacgcggcggttttgaaagttaccaggagcgcgtggaaggcaataaagttcgcgagcgcagcccaagctttggcgaatattattcccatccgcgtctgttctggctaagtcagacgccatttgagcagcgccatattgtcgatggtttcagttttgagttaagcaaagtcgttcgtccgtatattcgtgagcgcgttgttgaccagctggcgcatattgatctcactctggcccaggcggtggcgaaaaatctcggtatcgaactgactgacgaccagctgaatatcaccccacctccggacgtcaacggtctgaaaaaggatccatccttaagtttgtacgccattcctgacggtgatgtgaaaggtcgcgtggtagcgattttacttaatgatgaagtgagaagcgcagaccttctggccattctcaaggcgctgaaggccaaaggcgttcatgccaaactgctctactcccgaatgggtgaagtgactgcggatgacggtacggtgttgcctatagccgctacctttgccggtgcacctagcctgacggtcgatgcggtcattgtcccttgcggcaatatcgcggatatcgctgacaacggcgatgccaactactacctgatggaagcctacaaacaccttaaaccgattgcgctggcgggtgacgcgcgcaagtttaaagcaacaatcaagatcgctgaccagggtgaagaagggattgtggaagctgacagcgctgacggtagttttatggatgaactgctaacgctgatggcagcacaccgcgtgtggagtcgcattcctaagattgacaaaattcctgcctgatgggaggcggcgcaattgcgccgcctcaaatgatttacatagtgcgctttgtttatgccggatgcggcgtgaacgccttatccggcctacaaaactgtgcaaattcaatatattgcaggaaacacgtaggcctgataagcgaagcgcatcaggcagttttgcgtttgtcagcagtctcaagcggcgcagttacgccgcctttgtaggaattaatcgccggatgcaaggttcacgccgcatctggcaaacatcctcacttacacatcccgataactccccaaccgataaccacgctgagcgatagcacctttcaagctcgcacttgtcaacacatccagctccgttaagcgtgggaaacagtaagcactctgacggatagtattatcgataaacgccggatgacacatcacctccaggctacgatcaccccgatggcctgcgtcatccagcacttgcaggaacaggctctcactgatctcttcaccgtagaatgcactgctgaatccctgggtagtgcgcaggttgaccggcaaatcaaacgccatctgacgatccgcccgcaacgcaatgccctgctctgccgcaaacctggcaacaatcgggaaaatctgcgggaacatatgcacatgatgatggctatcaagatgcgtaggtttgcgtccaaatagctcaatgaaacgcaaatactgactgacaagctcctgagtaatttcttccagcggtaaagcatcttcttctgccaactgccagatccattttcccagcacaccatcgcgggttaaccccggcatagctgtcagtggcttacccatagtaaggacaaagtgcatccctatggccagactcggttcatcacgactcaactgcaccgcatggtcaatagcctgcccattcaccagcgccgtcgtgctcgtgacaatcccattgcgacaggcctcgataatgccgtagttctgacctttgcttaagccaaaatcatcggcattaacaatcagtaagcgttccataatcagcctcggttaatgtgcttttttaagctctgcgatgcagtcggcaaagtttggcagccatttctcgtgcgccagaatcatctcgcgtgccagcagctcagcatcgcgatcggaatgcaccaacggactaaggtttagcgccagtaacacatcgttaaattctccgctaagtgcggcgttactggcagcaatctcgaagcctttaatggtgtgaatcagccccattactttatcatcgaaatgcgtaatgcgcggatgtggcgtcgcgccatcgcgccccagcttacaggtcatttctactgcccagtctgccggaatattatcaatctgcccatgatgcgggatattaacgtaatgttctgcttgcttgtcgttgtagatagcgttgatcacttcgcatgctgcatcagagtaataagccccaccgcgctgttccagttctttcggcttaactttcagctcaggatttttatacagctcaaaaagttgtttctcgactttctgtactacctgcgctcgtgcgccgcctttgtagtattcgcccatttcaatagccagcatctctttctgcttgaagtaatacagcagataagaacatggcagcagattcaagctacgaattaagccctcactaaatggcagatcgaaaatattttttacagaggacgcttttaactgcccactcgccacaccatcaagcaattcggcaaagcggctcttgccatttatcagcacatccttaatgaacaccatatggttgaggccgaacaaatcgatagataaatcatcgctgtctttcagcatcagaacatcgcgaataaacatcttcatgccgatcggaatattacacacgccgataaagcgtttaaatccggtatgacgataaacggcttcagtgaccattcccgccgggttagtgaagttaatcacccatgcattcggacaaagttcttcgacatcttttacgatgtcaaaaatcaccggaatggtacgcagacctttaaacaaaccgcccgcgccgttggtttcctgaccaagataaccatgacttaatggaatacgttcatccagttcacgcgccggtaattggccaacgcgcagttgggtagtaacgaaatcagcatctttcaatgcttcgcggcgatccagcgttttataaagcttcatcgggacgccagcgttatcaatcatccgttggcagagatcgaaaataatatccagtttcggtttaccaccttcgacatccaccagccataattcgctgaccggcaattcgtgataacgcttaataaatccttccagtaactccggggtatagctgctcccgccaccaatagtgacgacttttaatttctggctcataatttctcccttcagtacagaatactgatatctggcatatctgcccccccggacataaataatccagcaacaggacagatatgtgaattgtcaggtataacgacttactgattaaattcagtcaatttcttacgatagctcttaggcgtaaaggacgttaatttcttaaacgttttaataaacaaactcgggctactataaccggcctcaaacgcaatatccgtcacactatagttggtcatttccagttgttttttggcaaaattaatacggatttcattaataatctgcattggcgttttgccataatatcgttgagtcgctcgcgtcaaatattcctgacttttggcactcaacgccaccatattctccagcgcgctttcactaaactgctctttatcatgcatcttttctaccgtacttttcagccactgcggtacatcatcaatcacctgttcttcgcggtaatgacgtaaacggttaatgacataaaaagtaaccatctcaacaaactcttccagccctgtttcgcggaaattcaaactagaaatcactgtttccacataggtgagaaaagcgttattggtccggtatacctggctagcgacaaagcaataaggcaacaatggcaggtaatgctgctcaaaaaagcgtttactgatcccaacgttcaatatgcgcgtggcaccaaactcataaaaactttgatggtggctacctaacggaataaaaacaaaatcgccccgttccagtaacacgcgcttaccgttaatctcctggaaataacgcccggttaataccagagtaaattcataatagtcgtgctgatgcagtccgctgatactctcagttttgttatagataaacacatggaagtttttgccattaaacaactgctgttctcgggcagtggcaatttccggcgcgttaatcactggctgcatcatcgactccttatgccttcagtttttcatgaagctcaattaattcagtaatcagttcacgcgcaagcatggacgtcattaaatgatcctgagcgtggaccagcaccagactcactttcatcttaccttcgcccgcatcgccttcaatcagtttcgtctgtaccagatgcgcttcattcaatgccatccgactctgatccatcatggcttttgctgcggcaaaatcgccctgcttcgcctgtttcagtgccgcatacgccaggctgcgcgcttgtccggagttgatgatcagccccatcaccacttcttccagctcttcagcttccgtttgcgtatcgggaatgttatcgagatccatcatacatcgttcctctcttttcttaccggcacgattacccgtaccggcatcgattaaaatttcagggcgttagcgatatcttcttcgctctcttctttatcaatcgcattttgtgctttgttagccaccacaacaaagggcagataaattaacgttgcgatgccaaggttgaagagtgcgaccagcaatgcggcgacgctaccgttggtgttaaagaaggctcccagaccggttggcatggtccacggtgcaatattggtcaccggaggaataatgcccatgtagtacgctgcgagggtgattgccgccagaatcggttgtaccagtacaaacgggataaacatcaccgggttcatgataattggcagaccaaacagaatcggttcgttaatctggaagatgccggacggcagcgccagttttgccacctgacgataatcagcacggcgagaggcgataaagatagccaggatcaggcctaaagtcgcaccactgcccccaaggaaaataaaggagtccagcatcggcttggcccagatatggaaggtcttaccggctgccagcgccgcttcgacggaaccatattgctgataggtcgcgatattttccagtgcccacggcgtcataatgccgttgtccagtgcggtcagcgccagcgcgccatgaataccgaagaaccagagcagtggaacaaagatcacataggcccagcccaccacgctacccaagcttgccagtggggtactgatggtatccataatgatctgatggaagttggtgccccaggtattcaacgcccaggcaataatccccatcacggaaagaataataaagccgggaattaatgcgctgaaggaacggcttacactagcaggtacgctgtcgggcagtttaatgacccaattgcggcggacaataaaggtaaacatttctgccaccaccaggccaataataatcccggagatgatattcgccccacctaaccagtttgcaccaaccgcataggcctcaccgacactatatggggtgacggtcataaatgctgcaacggataacaacccagccgccagcgcatcgactttacgctcttctgccagcgccatgccaataaagaacggtgccattaaagacattattcctaatgttccgttatatacgttgccgccaatacctttcagaccattaagtgtttcaatggtactggcgtcgaggcgaatacctaaggaataaaaaaagctcccctccccaaagcttagaaaaacgttgttaattaatacaaacatggcccccgcaagggttaacggcattaagcgaataaagccatttttgattgcattaacgtgtggctgctttcctattttaactgcaaaagggaggagtaccttttcaaggcttgcaataacattactcatagaaaaatacccttaaaaaccgcaatttaaatattgcggtattgatttatgaaataactctttgacgggaaaatttaaaataaattaatttgctgcggcttttttaatcgctgcaaccgcagccttaagcacgcctaaaccatcgactttgccataaagcaggctgtcaattacttcaaccggtttgttgggtaacaaacgctggatttcgggcaacatataagcaatctgcggccctaataacacgacatcggcattctgacctttttcaccagccagtgtttccggaaatgcttcaataatgaccggaacttcatatttttctgcctgtgcgcgcattttacttaccagtaaagaggtagacatgcccgcagaacaaaacagataaatgtgtttcttttccataaaactgccctcatcgacgattatctgtcagccagacactccgcaagccttaacctgcttccatgctctgggtaacttgcgaaaccaacatgactttttttgtggctgaaaggagtatacggtatagacctgagcaatagtatttctttgaccttataaattgtttctccttgacctgtggttatgaccctcttcacatttcgggcaaataattcgcgaagataattaagaactcaggccaaaaaaaaccggcgcaatggccggtttccgttgttactcaagctttcagacgaattgattacttcgcagcctgtggatcagtgtcgtattcagcacaggtctgataaccggagttgatgacatgtccggtatcatctaacgcgacaaagtaggtttctgctttaccatcacgttgacccaggatgtaggtctggcaagtaccgcgagcatggatcatgctcacttcagagctaggtttacccgcaatttgtgcaacctgcgcccggctcatgccttttttgacgtctttcaccacaggctgtacaaactggtctttggtacgatcataagccgtacaacccgccagcatggttaataccgccgctgcactcagaattcctgccatattcttgttcatattccgtcctcttgtttatcagcgtgttagataagcctggaatacattgggcgctttttcaagcccgtgaacgaaacggctccgctttcagaggattcctgtatgacgttttaaccaccattcagcccgctgtcgcttgtcgtttcagtagcaacgggttagctttaaggaagttttgtcttttctgtctggaggggttcaatgacattgcaacaacaaataataaaggcgctgggcgcaaaaccgcagattaatgctgaagaggaaattcgtcgtagtgtcgattttctgaaaagctacctgcaaacttatccgttcattaaaagtctggtgctcgggatcagcggcggtcaggactccacgcttgccggaaagctgtgccagatggcgattaatgagctgcgcctggaaaccggcaacgaaagtctgcaatttattgccgtacgcctgccctatggtgttcaggccgacgaacaagattgccaggatgccattgcctttattcaaccggatcgcgtattaaccgttaatatcaagggcgcggtattggccagcgaacaggcattgcgggaagcaggcattgaactgagcgattttgtccgtggcaatgaaaaagcgcgtgagcggatgaaagcacaatatagcattgcgggtatgaccagcggtgtcgtggtgggcaccgatcatgcagcagaagccattaccggattcttcactaaatatggtgacggcggtacggacattaatccgctgtatcgtctcaacaaacgtcagggtaaacagttactggcggcattagcttgcccggaacacctttataagaaagcgccaacggccgatctggaagatgatcgcccttctctgccagatgaagtggcactcggcgtgacctatgacaatatcgacgactatctggaagggaaaaacgtacctcaacaggtcgccagaacaatagagaactggtatctgaaaaccgaacataaacgccgtccgccaattaccgttttcgatgatttctggaaaaagtaataatttgcacatattggattgtgcgaaaaagagtaatttgttcacgccggatgcggcgtgaacgccttattcgacctataaaactatgcaaattcaatacattgcaggagtcgaataggcctgacaggcgtagcacgtcagacggtgtaacctttgtcatcgacccgcctcttttttaatcgcttcccgcctgttacactggatagataaccagcattcggagtcaacagtggtacggcgtttaacttctccgcggctcgaatttgaagctgcggcaatttatgaatatcccgaacatttacgtagtttccttaatgacttacccacccgaccaggggtgtatctgtttcatggtgaaagtgacaccatgccgctctatatcggcaaaagcgttaacatccgcagccgcgtcctttctcatttacgtaccccggatgaagccgccatgctacggcaatcccgacggatcagctggatatgtaccgccggtgaaatcggcgctctgctccttgaagcgcgattaatcaaagaacaacagccgctgtttaataaacggttgcgccgcaatcgccagctctgtgccctgcaattaaatgaaaagcgcgtcgatgtggtgtatgccaaagaggtggattttagtcgagcccccaacctgtttggcctgtttgccaataggcgcgcagctttgcaagcattgcagaccatcgctgatgaacaaaaactttgttatggcctgctgggactggaaccgttaagtcgcggtcgtgcatgttttcgtagtgcgctaaaacgttgcgccggagcatgctgcggtaaagagagccatgaggaacatgcgctacgcttgcgccagtctctggagcgtttgcgggtggtgtgttggccttggcaaggggcggtggcgctgaaagaacagcacccggaaatgactcaatatcatattattcaaaactggctgtggctgggggcggttaatagcctggaagaagcgacaacgttaattcggacacccgccgggtttgatcacgacggttataaaattctttgtaagccgctgctttccggtaactatgaaattactgaacttgatccggcgaatgaccagcgagccagttgattactgaacttgatccgggctatgaccagcgagccagttgatttcactgaacaacagtttaccttgcggttgtaaaagccgcagggtgtgcctgccatcgaaccagcacgcgccctggtcggtagtgagcaatttatcgcccagttgccacgccccgttaatcacaaacaccaccccgccgcgactgccaaaggtagtaaacgtacgttcggcaattctgactttcgccttacagacatccaggcgtgtcatgatgttgaaatccatgctcatctgccctgccgtcagtttcgcttttaccacctggtccgctgcaaaggcaaaaggctggaacggttttaaggtatggttaaagcggtctgcgctttcaaggagcatctcgccgccttccagcaacgtcactatcctttccatgccgggaaacaaagaaaactccccattcgccgcgatggatgcaatgctggcacgccagtaaaaatcacgttttgccggtgggaacgtgcaaatttcgcgcgtttcaccggcagcatttcgccacagattcacgctcattttacgcatatcaaagtattccatactcgctcccggcccgttcttttcattgttatcgttcaggtaaccgtggatggttatcggcaactcgggtgatttacgttagtggtgatcaggctttttttacaactgtttgagaagagaaaagaaaaccgccgatcctgtccaccgcattactgcaaggtagtggacaagaccggcggtcttaagttttttggctgaaagattattcagcagttgcaggcattttaccttttgccgctggacgttctgtcagacgcttctcaaaattagcattaaattgctttttctgttccggcgtcaggatgttgtaaattttgttctgggtttccatgtgcgccagcatgttagctttgcgctgttcttccatttttgcgatctgcgcttcagcttttactttatcgaaggtatcgctggcaatgatgtcatgcattgcgcggcgttcttccagcggcggacgtttcatctggtcacgctggcctttcatgatttcgcggatctgctgtttctgcgcgtcggtcaggttcaggtctttgaacatcatgtcctgatgcggaccgaacttgcctttgtggtgcatcatcggcttcgcgtcagccggtgctgcggtagtggtgtctgcggcatgggccaggttagccgcgccaagagccagggtagaggcaacaaacagtgcagttaatttacgcatattctatatccttcctttcagttatttattacggctttcttaagtagcgtgccgtgttgacgagattaactttactgactttagcgtcaattaatcagagcaacggtaaaacaatgaaagtgtaaaaaacacttttgcgccaattatggagaaaaaaagaaaatttgatggagagtgatgagagaatattacaacacgatgattttgcagagattatgaagaactataccggatgactggtgataaataaagcaaataaccaggattaatctgtattaatttataagaaagcaacttaatacccgcagaatgatttctgcgggtaagtattagcttattttttcgagcattaatcccgcgcgtaatcccaacgctaccaacggattagggaataacacatactctacatcatgggttacggtaaaacgttcctctccgtcctgcgccagcaatgttcctttctcaaacggcataaaattcagcgtgtcacttgccatatgcatttcgaaggacgggctgtggcgagtaatttggctaaccacccgataacggagcggcggtgttctcacgataccgacactctcaccagatagcagcgcagcaattgcgctggcagttactgcaaactggcgaagatcgttttgcccaaagggcaacgctttgccaagttccagcgtacaggccagcgcgccaaaatgtctggcgctgaaatgggtaaacgtaccaccaggttcctgatggaacaccagcgcctccagccccgccgcacccagccacgtcagaaatttctcgtcccagggaatgtcgcgttgcggtaatacaccgaactgcggatgcaaggagccacgaattgcggtatgtagatcaaggtgccagcgcacagattctttgccctggtcataaaaatcttccaggcactgttccagttcgcgcgcccgacaggtttctccgctttcagcaaatagctgccaacgaccgccaaacattcgattcatatcgctatggcaataacgtttcccttgcttcagcgcaggaggattcccgaggatcaccagcaaccgccaacgtaacgggatctcgccgtgagatatcgcgccaagcaacgcgtccagcatctccacaggtgccgtctcattaccgtgtattcccgcactaatcaccagtgcgccttgcggtggcgttaatggcgtcagttccagcacaccatcgcccagccagcgccagcgaacgccgttgatttctcgctcggtgataaccggttttttacccgttaaggtcagagcaagaaaattatccattgccccctccctcgcgctggaacggataaacgctaccgagattcagtaattggctcaatacatccagtgcttcccgcccttcgcgcagcaattgcgggtcggccagatcggcagcagtaaggcgatcgcggtagtaacgatccacccagtcattgagcgcattaaacagcgtatcgttcatcatcaccgccggattcaccgcccggcgttcttcttctgtcaataccacccgcaaccgcaggcacgccgggccgccgccattcgccatgctttcacgtaaatcaaagacttttagttcgctaatcgggttgtcagcggcaaggagttcattgagataaccccatactccggcgtgttcccgacactcctgaggcagcaccaacatcatggaaccatcatcgcggctcagcagttggctgttaaacagataggtagacaccgtatcagacacggaaacctgagttgccggaacttctatcgccataaaaccattgacccgcgcacgcaggtttgccagtaactgactctggcgagcgaacgcctgttggtggcaaaacagcacctggcggttactcacggcaatcacgtcattatgaaaaacgccctggtcgataacgtccgggttttgctgggcgaaaatcacctgttggggattcacctgattcagccttgccaccgcctcgctggcttcgcgagtctgtcgcgccggataacgggaaggccgggtatcattgccttcttctcgcccgtagacaaaaagttgcatacccggttcaccgtaatgaccgccgagacgattgtggtttgccgccccctcatcaccgagcaacgctacctgtggcaacgcgctatggacgctaaatttctcttcgtcgttaaaaatcgcttttaacaggctttcagtgacgggcgcttccaggctacggtgaaatttattgttcaggttggcaacggtgagatgcactttgccatccagcgtatcggcagatggcgcgatcgttgccgcattggctacccacattgggctagcggaactgacgctggaaagccagtgcggtgcctggcgtgcaactttttccagtacctgctcatcgctaccactgaatcccaactgacgcagcaccggaataaacggacgctcgtgcggcgggatcacggcctgggggaatcccgcatcggcaagggctttcattttcagtaagccctgcttcgccgccagtcgcgggttagacacctgaaaacggtgacgggtagaggcttcattaccaaagctcaggcccgcgtaatgatgcgtcagccctaccagcccgtcgaaattgacttcccaggcgttcatcgcaccacctcatcggaaaaatccagcccggggttaagcgtggcgggcaatgttaagctgtcgctctccaggctcgccatcggccatgcgcagtaatctgcggcataccaggcgctggggcgatggttaccggaagcaccaatgccgccgaatggcgcggtactggcagcaccggtaagcggtttgttccagttaacaatccccgcccgcgcctccagcaacagttgatcgaacttttcccgctcgggggaaaccagaccgcaagagagtccgaagcgagtgttattcgccattcgaatcgcttcatcgaaagtatcataacgccagacgcgcaataacggtccgaacacctcttcatctggtacgccagcaacgcctgtcatttcaatgatccccggcgtcagcaagcttgtccctgcttgtaataagcgcggcgcaagcaggggtcgtccgcccatcgcttccagttgctgccatgcagtaaccacctgctgtgcggcctgttcagaaatcagcccgccaataaacggctgcggttcgtcatcccagttgcccggcgttaatcgctggctgacggcaaccagacgagcaagaaacgcatcgccctgcgccccgcttttcagcaataaacggcgggcgcaggtgcagcgttgaccggctgtgacaaacgcgctctgaatggtcagatggacagccgcgtcgatatccgccacctcatcgataattagcggattattaccgcccatctcaagggcgagaattttctccggctgaccggagagctggcgatgcaactggtagcctgtattggcgctaccggtaaacagcaaaccgtcgagatcctccagcgcactcagcgcctgacccgtttcacgcccgccctgcaccaggttcagcacgcctggcggcaagccagcctgctgccataaacgcattaccgcttcgccactccacggtgtcagttcgctgggtttaaagataatggtgttacctgccagcaatgccggaacgatatgtccgttcggcaaatgaccagggaaattatacggcccaaacaccgccagcacgccgtgcgggcgatgtcgcaggctcgccgcgccgtccggcatttcactacgctgctcgccggtacgaacgtgatacgccttaatacttatcgcgattttattgatcatcgccgtcacttcggttgccgcttcccagcgcggcttacccgtttctctggcaataatcgcggttaattcggctttattgctttccagcagtgcggcaaagcgttcgacaacggcatgacgttcagcaaaactaagccgcgcccagcgcggaaacgccgcacgggctgcccgacaagcctgctcgacctgagcggcatcggcatcattgccttgccataacacctcgccgcttaccggattacgcttcacacggcttgcgccctggcccgttatccagtcaccgttaatccataaagtcatgctgttttctcctctgcgcacaggcgcaccagacgaacgcgatccccggcgtggcatttgagggcatccagttgtgcggcggttaaaatcaaacgctcggttgccggatcggtacgcaccagcaccacgcggaaatggtgataattttcattggcgaccaggcaggctgggaaatcgccctgcgcaggctgcccttctgccacttccaccagccgacttttacggatggcgcgcacgcggtcgatgtcacactcaagcgtcggcccaccgtcaaagatgtcgatatagttacggtagcgaaaaccttctttctccagcaccgcgcgggcaggcgcggtttgcggatgtacctgaccgatgacgtcctgggcttcctgggataaaaagtgggtatagatcggatgtttcggcatcagttctgcaataaatgccttttgcccggtgccgcagagaaaatcggcgcggctaaaatccatgctaaagaagcgtttaccgaggctttgccagaacggactatagccgtgttcgtcaatcaccccgcgcatttcagcaaccactttgtcattaaacttgtcgcgaaaagccgccataaacataaagcggcttttgctcagcaaatagccgttgccctctttgcgccagtccgggtcgagaaacagcgtgcacagctcgctgctgccggtgtgatcgttactgagaaacagcgtcggcaatgcgttatagacattcagctctttactggcgtgaaccaacgtgccgacgcgatagttgtaccagggatcgttcagcccaaccgccacctcaatggcacaaatccccgccacggtgcctgtctcgctatcttccagcacgaacacatagccctgctcacttttgggcagttcgccttgccaggttttgattgccctttcgatacgcgcgctaagcgtggcttcattggcgggaaggctcgtcaggccgccgcccgttttgctggcaagctgcatcagcgcgctgacatcacttcgctcaacgggacggatgaccatcatgatgaacctcggctaacaaattatttcaactactacctcggctaacaaagtgttcgcaagcagctgcaaagcgatccagtccggtcgtcacctcttcttcgctgacattgagcgcaggcgcaaaacgcaccacgttgccacccgcaatcagtaccatcacgcctgctttcgccgcttcctgagagatctgtttcgcttgcccggcgtaatcggcattcagtacacagccaatcagcaaacctaagccgcgaacttcactgaacaaaccatagcggtgattaatagtattaagacgctcaacaaaccagtcgtgacgctgtttaacgccattaagcatctctggtgtgttgatgagctccagcactttgcctgccaccgcgctggccagcggattaccgccataggtggtgccatgagtgccaacggtcatcacgcgggcgcactcttcggttgccaacaacgcaccgaccgggaaaccgccgcccagcgctttggcggtagttaacagatcaggcgtcacgccgtagtgcatataggcatacagttccccggtgcgcccgacgccggtttgtacttcatcaaaaatcaacagcgcattgtggcggttacacaattcacgcagaccttgtaaaaacgcgttgctggctggcaccacaccgccttccccctggatgggttcgacaatcaccgcacaggtagagtcgtcaatcagcgcgctggcagagttaatatcgttatatgcagcatgacgaatatccgccggcagtggcgcaaaatcctgactataggctggctgcccacccgcactgacagtaaacagcgtgcgaccatgaaacgcatttttgaacgccacgatgccgctcttatggctgccgtagcggtcgtgagcgaatttacgcgccagttttagcgccgcttcgttggcttccgcaccggagttacaaaagaagacgcgatcggcaaacgtggcgtcgatcaattttttcgccagtcgcagtaccggctcgttggtgtaaccgttgccggtatgccagaacttactcgcctgttcgttcagcgcttcacgcagttccggatgcgcatggcccagcgcgttcaccgcaatgccacccgcgaagtcgatatactctttcccctgctgatcccacaagcggctaccttcgccacgtaccggtataaagggtgccggagcgtaaacaggtatcatccattcatcaaagttttcacgcgtaattggctgagacatagcgacctctacagtaaataattcgttatttatatgttaataataagtaatgtttgcgctgtaaatgtagattgcagggttcgtgccagccagtgataaaagtgcataaacggcggaggctaactggaaatcaaggagttataaccaaaccatatgcatttaaagtgcatataaagtgaatacgtttgcgatgtgggtgaataaaaagaataaaaaacgcaatgttatgcagaagtaaaatataattctggaattgtgatcattgacgaaatttactggaaattactgcgccattctgacgcagcgcgcaccaaaagcgggcattttttgcgccatcgttgacatcattaacaaccatcgatcaaatcacttaacaacaggcggtaagcaacgcgaaattctgctaccatccacgcactctttatctgaataaatggcagcgactatgaaatttgtctcttttaatatcaacggcctgcgcgccagacctcaccagcttgaagccatcgtcgaaaagcaccaaccggatgtgattggcctgcaggagacaaaagttcatgacgatatgtttccgctcgaagaggtggcgaagctcggctacaacgtgttttatcacgggcagaaaggccattatggcgtggcgctgctgaccaaagagacgccgattgccgtgcgtcgcggctttcccggtgacgacgaagaggcgcagcggcggattattatggcggaaatccccagtctgctgggtaatgtcaccgtgatcaacggttacttcccgcagggtgaaagccgcgaccatccgataaaattcccggcaaaagcgcagttttatcagaatctgcaaaactacctggaaaccgaactcaaacgtgataatccggtactgattatgggcgatatgaatatcagccctacagatctggatatcggcattggcgaagaaaaccgtaagcgctggctgcgtaccggtaaatgctctttcctgccggaagagcgcgaatggatggacaggctgatgagctgggggttggtcgataccttccgccatgcgaatccgcaaacagcagatcgtttcagttggtttgattaccgcagtaaaggttttgacgataaccgtggtctgcgcatcgacctgctgctcgccagccaaccgctggcagaatgttgcgtagaaaccggcatcgactatgaaatccgcagcatggaaaaaccgtccgatcacgcccccgtctgggcgaccttccgccgctaatttagcagctctcctggctcaaactgggtcaggagaattaaccttgagaaaaatcaacaaactgtcagtaatgatttgttgcctgccgtcctttgttataccgtctctgcgtttttagttgtctgaccacttctctattatcaagtttgatataggaaactccacgatgaacgctgagcgtaaatttctttttgcctgtcttatttttgcgctggtcatttacgctatccacgctttcggtttattcgatctgctcaccgatttaccccacttacagacactcatccgccagagcggatttttcggctatagcctctatattctgttattcatcattgccaccctcttgctgttaccaggaagcatactggtgatcgcgggaggaatagtttttggcccgctcttagggacactactcagtttaattgccgccacgctggcctccagctgcagtttcctgctggcgcgctggctgggacgtgatttactgctgaaatacgttggccatagcaataccttccaggccattgaaaaaggcattgcgcgtaacggtattgattttcttattctgacccgcttaatcccgttgtttccttacaatattcaaaattacgcttacggattaaccacaatcgccttctggccttatacccttattagcgcactcacgaccctacccggtattgttatttataccgtgatggcaagcgatctcgccaatgaaggcattacgctgcgctttattttacaactctgtctggcgggcctggcgctgtttattctcgtccagctcgcaaaactctacgcccgacacaaacatgtggatctgtctgctagccgccgcagcccacttactcacccaaaaaatgaaggataaaacgatgttgcaacattatagtgtgagttggaaaaaaggactggctgcactctgtttactggctgttgctgggcttagcggctgcgatcaacaagagaatgcggcggcaaaagtggaatacgacggacttagcaacagccaaccgctgcgtgtcgatgccaataaccatacggtaaccatgctggtgcaaattaatggtcgtttcctcaccgacgacactcgtcacggtattgtgtttaaagatggctccaacggacataaaagcctgtttatgggttatgcgaccccgaaagcattttatgaagccctgaaagaggcaggtggtacgccgggcgaaaacatgacgatggataataaagaaacgactcatgtcacaggcagcaaactggatattagcgtcaactggcaaggggcggcaaaagcgtattccttcgatgaagtgattgttgacagtaatggcaagaaactggacatgcgctttggcggtaatttaacggcagcagaagagaagaaaacgggttgcctggtgtgtctggatagctgcccggtcggcatcgtcagcaatgcaacatacacttatggtgcggttgaaaaacgtggtgaagttaaattcaaaggcaatgccagtgttctcccggcggataacacgctggcaacggttacctttaaaatcgccgaataaagccaggataaaggatgatgatgatgcaaagccgaaaaatctggtactaccgtataaccctcatcatcctgttgttcgctatgctgctggcatgggcgctgcttcccggcgtccatgagtttatcaatcgcagcgttgcggcgtttgccgccgtggaccaacagggtatagaacgctttattcagtcttacggcgcactggcggcagttgtcagcttcttgttgatgattttgcaggccattgctgcaccgctacctgcgtttttgatcacctttgccaatgcgagcctgtttggcgcgttctggggcggcttgctgagctggaccagtagcatggccggcgcggcgctgtgcttttttatcgccagagtgatgggccgcgaagtggtggaaaaattaaccggcaaaaccgtgcttgacagtatggacggctttttcactcgctacggcaaacacaccattctggtctgtcggttattgccttttgtccctttcgatccaatcagctatgctgccggtttgactagtatacgttttcgcagcttttttatcgccaccgggcttggtcagttaccggcaactattgtttattcctgggcgggcagcatgttaacaggcggtactttctggtttgtcaccggactgtttattctgtttgccctgaccgtggtgatttttatggcgaagaaaatatggcttgaacgccagaagaggaatgcctgatgggtttaccgccgcttagcaaaattcctttaattttacgtccacaggcgtggctgcatcgtcgccattacggcgaggtgctaagccccattcgctggtgggggcggatcccgtttatcttttatctggtgagcatgtttgttggctggctggagcgcaaacgcagtccgctcgatccggtagtacgaagccttgtcagcgcgcgcattgcgcaaatgtgcctgtgtgagttttgtgtggatatcaccagtatgaaagtcgccgagcgcaccggcagcagcgataaactgctggcagtggctgactggcggcaaagcccgctctttagcgatgaagaacggctggcgctggagtacgccgaagccgcaagcgtaacgccgccaacggtcgatgatgccctgcgtacccgactggctgcgcattttgacgctcaggcgctcaccgaactgacggcattgatcggcctgcaaaatctgagtgcccgttttaattctgccatggacattcccgctcaggggctgtgccgtattcctgaaaaacgttcttaaggagagatgatgcgccattgtgggtggttgctgggattgttaagcctgttttctctggcaacacatgccagtgactggcaagaaattaaaaatgaggccaaagggcaaaccgtctggtttaacgcctggggcggcgataccgcaattaaccgctatctcgactgggtgagcggcgagatgaaaacccattacgctataaacctgaagattgtccgtctggcggatgccgcagacgcggtgaagcgcattcagaccgaagccgcagccggacgtaaaacgggcggcagcgtggatctgctctgggtgaacggcgaaaacttccgcaccttaaaagaggccaatttattacaaacgggctgggcggagactctgcccaactggcgctatgtcgacacacagctgccggtgcgggaagatttttctgtgccgacacaaggtgcggaaagcccctggggcggcgcacaactgacgtttatcgcccgccgcgatgttacgccacagccaccacaaacgccgcaagccttactggagtttgctaaagccaatcccggcacggttacctatccgcgcccaccggactttaccggcacggcgtttcttgaacagttgctgattatgctgacgcccgatcccgccgcattaaaagaagcgccggacgatgcgactttcgcccgtgtcactgctcccttgtggcaatatcttgatgtgctgcatccgtatttgtggcgcgaaggaaaggatttcccgcctagtcccgcgcggatggatgctctgctgaaagccggcacattgcgcctgagcctgacctttaaccccgcgcatgcgcagcaaaaaatcgccagcggcgatttgcctgcaagcagttacagttttggctttcgcgaggggatgattggcaacgtgcatttcgtcaccattcctgccaacgcgaatgccagtgctgcggcgaaggtagttgccaatttcctgctcagtcccgatgcgcaactgcgtaaagcagatcccgctgtctggggcgatccttctgttctcgatccgcaaaaactgcctgacgggcagcgcgaaagtttgcaaagtagaatgccgcaggatctgccgccggtactggctgaaccgcacgcaggttgggtaaatgcgctggaacaagaatggctacaccgttacggtacgcattaatctttttgctgtgggcgatggtggcggtgatttatgcaccgctgatcccggcagctctcacgctgataagccctgctttgagcttgacacactggcaggcgttatttgccgatccacagttaccgcaggcattactggcaacgctggtgagcacaaccatcgcggcggtcggggcattgttgattgccctgctggtgattgtggcgctgtggcctgggccgaaatggcagcgtatgtgcgcccgtctgccgtggctgctcgccattccccatgtggcttttgccaccagcgcccttctgctctttgctgacggagggctgctttatgactatttcccgtatttcactccgccaatggaccgatttggcatcggtctgggcctcacccttgcagtgaaagaaagcgcatttctgctgtggatcttagcagcagtattgagcgaaaaatggctgttgcagcaggtcattgtgctggatagcctgggctacagccgctggcaatgcctgaactggctgctgttgccctccgtcgcgcctgcgctggcaatggcgatgctggcgattgttgcctggagcctgagcgtcgtggatgtggcaattattctcgggccaggtaatcccccgacgctggcggtaattagctggcagtggttaacccagggcgacattgaccaacaaacaaaaggcgcgcttgccagcctgctgttgatgctgttactcgccgcctacgttttgctgagctatctgctatggcgcagctggcggcgcactattccccgcgtagatggcgttcgcaagcctgccacgcctttattgccgggcaatacgctggcgatttttttacccttaaccggtgtgctgtgtgtggttctgctggcgatcctcgcggatcagagcacgatcaatagtgaagcgctcatcaacagcctgacaatggggctggtggcgacattcatcgctttgctcctgttactgctgtggctggaatgggggccacagcgtcgccagttgtggctatggttgcccattttattacctgctctgccactggtggcgggccagtacacgctggcgctatggctgaaactggatggaagctggacggcggtggtctgggggcatctgctgtgggtgatgccgtggatgctgtttatcctgcaacccgcctggcagcgcattgatagtcggttaattttgattgcgcaaacactgggctggagccgggccaaaatcttcttttacgtgaaatgcccactcatgttgcgccctgtgctgattgccttcgcggtgggatttgcagtcggtattgcgcagtatatgccaacgctgtggctgggcgcggggcgttttccgacgctcaccactgaggcggtggcattaagcagcggcggcagcaacggtattctcgccgcccaggctttatggcaactgctattaccgcttattatttttgccctgaccgcgttagtcgcaaaatgggtaggttatgtcagacaaggactccgctaatgctctgcgtgaaaaatgttagcctacgtttaccagaaagccgcttgctgacaaacgttaactttacggtggataaaggtgacattgtcacgttaatggggccgtctggctgtggaaaatccactctgtttagttggatgattggtgcactggccgaacagttttcttgtacaggtgagctatggctcaatgagcaacggattgacatcctacccaccgcacagcgtcagattggcattctttttcaggatgcactgttatttgaccagttcagtgtcgggcaaaatttactgctggcgctaccggcgacacttaaagggaatgcccgacgtaatgccgtgaatgatgcacttgagcgtagtggccttgagggagctttccatcaggatcctgccactttgtctggcggtcagcgagcgcgcgttgctctactacgcgcccttctcgcccaaccaaaagcgttactcctggatgagccattcagccgtcttgatgtggctctgcgcgataattttcgccagtgggtgttcagcgaagttcgcgccctggcgatccccgtcgttcaggtaacgcacgatctccaggatgttcctgctgatagttctgttctggatatggcgcagtggagtgaaaattacaacaaactgcgataacgcaaagtttttctcaatgcgtcagttcagaatggcgcactcaaaactacaatgtcgggattttcgatgaaacgtgtttctcaaatgaccgcgctggcaatggctttagggctggcttgcgcttctagctgggccgctgaactggcgaagcctcttacacttgaccagcttcaacaacaaaatggcaaagcgatagatactcgccccagcgcgttttataacggctggccacaaaccttaaatggcccttctggtcatgaacttgccgccttaaacctctctgccagctggcttgacaaaatgagcaccgaacagctcaacgcgtggatcaagcaacataacctgaaaaccgatgctccggtggcgctgtacggtaatgacaaagatgtcgacgccgtcaaaacgcgactgcaaaaagcaggtttaacgcatatctccatcctgagtgacgcgctaagcgaaccttcccgtctgcaaaaactgccgcattttgagcagctggtttatccgcaatggctgcacgacctgcaacaaggtaaagaggttacggcgaaacctgccggtgactggaaagtcattgaagcggcctggggcgctcctaagctttaccttatcagccatattcccggcgctgactacatcgataccaacgaagtggaaagtgaaccgctgtggaacaaagtttctgatgaacaactaaaagcgatgctggcaaaacacggcattcgccatgacaccacggtcattctgtatgggcgtgacgtatacgctgcagcgcgtgtggcgcagattatgctttatgctggcgtgaaagatgtgcgcctgctggatggcggctggcaaacctggtccgacgcgggactgcctgttgagcgcggaacgccaccgaaagtgaaagcggaaccggatttcggcgtgaagatcccggcacaaccgcagttgatgctcgatatggaacaggcccgtggactgctgcatcgccaggatgcaagcctggtgagcattcgtagctggccagaatttatcggtacgaccagcggttacagctatattaaaccaaaaggtgaaatagccggcgcacgttggggacacgctggtagcgacagcacgcatatggaagattttcataacccggatggcaccatgcgcagcgccgatgatattaccgctatgtggaaagcgtggaatatcaaaccagagcagcaagttagtttctactgcggcaccggctggcgcgcgtccgaaacctttatgtacgcacgcgccatgggttggaagaatgtttccgtgtatgacggcggctggtacgaatggagcagcgatccaaaaaatccggtagcaaccggtgaacgcggcccggacagtagcaaataacattgcaattactgacgctggaggctcttcagcgtcagatacccactccacacccgcgtaaaggtcgtcatccagcacaacgcaccgaagatccacgcaaaccacgcaaaccatgcagggaataaacatcccagcacaaacagtaagatcgtttctgtgccttcggttaatccccccagatagtaaaagctcttatgtgcataaccggggttatcaatctgatgttttgctgccagtgcagcaaaggcgagaaaactgctgcccgtgccgataaacgcaaacaacaaccagccgcctgccagcgcattttgctccggtgcagcaagaataaagccaaacggcaccagcgcgtaaaagagaaaatcgagagaaatatcaagaaagccgcccgcgtcggtaagctctctgcgccgcgccagcgcaccgtccagaccatcaagcagcctgttcaacaaaatgacgactagcgccgccagataccagcccagcgccagaaacggcagagccagcacgccgatggcaaatcccactaatgttaaaccatctggcgtaatgcccggtttatcaagaacccgcacgcactgatgcaacaacggtttaatccggggatgaagatggcggtctagcacaggcactccttaaatataaagcctttctgattgagcaacagtgcggatattatggcatttttcgcttatctgcccgtgtgtaatttatgaaaatgattgaagttgttgccgccatcattgaacgtgatggcaaaattttactcgcgcaacgccccgcccagagcgatcaggcgggattatgggagtttgccggtggtaaagtcgagccggatgaaagtcagcggcaggcgctggtgcgtgagttacgcgaagaactgggcatcgaagcaactgtgggtgaatatgttgccagccatcagcgagaagttagcgggcggattatccatcttcatgcctggcacgtacccgacttccacgggacgttacaggcacatgaacatcaggcgctggtctggtgcagtcctgaagaggcgctgcaatatccgctggcccctgctgacattccattattagaggcgtttatggctttacgcgccgccagaccagcggattaattatggctttacgcgccgccagaccagcggattagtgctaagggttttgtcatcacgctggcattgcagcagtattccttcggctttaattaccgccccttcagaataattttgatcctgataaacgcagcactgagtacagggctgcgcactctgcccgccactactgaacacttctggcggtacgtttacctccacgtccggacgataatgcgggttagccagtgcaattaatggaaatgctaatactacggcgaacaatgctcgactcacagggaactccttaacgttattgtctctgctactgataacggtagccgggtggcaaaactttagcgtctgagttatcgcatttggttatgagattactctcgttattaatttgctttcctgggtcatttttttcttgcttaccgtcacattcttgatggtatagtcgaaaactgcaaaagcacatgacataaacaacataagcacaatcgtattaatatataagggttttatatctatggatcagacatattctctggagagtttcctcaaccatgtccaaaagcgcgacccgaatcaaaccgagttcgcgcaagccgttcgtgaagtaatgaccacactctggccttttcttgaacaaaatccaaaatatcgccagatgagtttactggagcgtctggttgaaccggagcgcgtgatccagtttcgcgtggtatgggttgatgatcgcaaccagatacaggtcaaccgtgcatggcgtgtgcagttcagctctgccatcggcccgtacaaaggcggtatgcgcttccatccgagtgttaacctttccattctcaaattcctcggctttgaacaaaccttcaaaaatgccctgactactctgccgatgggcggtggtaaaggcggcagcgatttcgatccgaaaggaaaaagcgaaggtgaagtgatgcgtttttgccaggcgctgatgactgaactgtatcgccacctgggcgcggataccgacgttccggcaggtgatatcggggttggtggtcgtgaagtcggctttatggcggggatgatgaaaaagctctccaacaataccgcctgcgtcttcaccggtaagggccttagttttggcggcagtcttattcgcccggaagctaccggctacggtctggtttatttcacagaagcaatgctaaaacgccacggtatgggttttgaagggatgcgcgtttccgtttctggctccggcaacgtcgcccagtacgctatcgaaaaagcgatggaatttggtgctcgtgtgatcactgcgagtgactccagcggcactgtagttgatgaaagcggattcacgaaagagaaactggcacgtcttatcgaaatcaaagccagccgcgatggtcgagtggcagattacgccaaagaatttggtctggtctatctcgaaggccaacagccgtggtctctaccggttgatatcgccctgccttgcgccacccagaatgaactggatgttgacgccgcgcatcagcttatcgctaatggcgttaaagccgtcgccgaaggggcaaatatgccgaccaccatcgaagcgactgaactgttccagcaggcaggcgtactatttgcaccgggtaaagcggctaatgctggtggcgtcgctacaagcggcctggaaatggcacaaaacgctgcgcgcctgggctggaaagccgagaaagttgacgcacgtttgcatcacatcatgctggatatccaccatgcctgtgttgagcatggtggtgaaggtgagcaaaccaactacgtgcagggcgcgaacattgccggttttgtgaaggttgccgatgcgatgctggcgcagggtgtgatttaagttgtaaatgcctgatggcgctacgcttatcaggcctacaaatgggcacaattcattgcagttacgctctaatgtaggccgggcaagcgcagcgcccccggcaaaatttcaggcgtttaactgtatttaacggaacttgctccccacggaacatttcttatgggccaacggcatttcttactgtagtgctcccaaaactgcttgtcgtaacgataacacgcttcaagttcagcatccgttaactttctgcgatagcagcagatatgccagtaaagaaatcccatttgactatttttttgataatcttcttcgctttcgaacaactcgtgcgcctttcgagaagcaagcattatataatgccaggccagttcttcttcaattgtcccgttttgaaaagctgtgctacttatgctgatcatccaacttaattccgccgcccatattagcttcgcgctggatttaccggagctatgattagcgcaatcagagatatagtcactgggaaaaacagcaaatttattcaacaaggcgataacctgctctggggcttcctccatgtttgctttaaaggtattggctccatggtcgccagaaagaaaatgctccattaaggcacaataactttcgctatcttcgataccccattgatcctctaaagactcgcgtcttttacttatgatatcgatgctgtcaaaaggaagcacatgatattggaaggtatctttgccaggttcaggctttcgcggccagaactccagcgtttcagaccattgcttatgatagaatcgataaggtgcgatcaattgtagcgcctgtaacttctcgatactgagcggctcaatacctttagcctgataataatgcagttgttctttttttgctttaaaaccggcccgaacaataagccccatcataattaatagataaagaaaagagcatcccgcggtaatcaggcctctttcattcaaaccgttggatgttatcgctgcgaacacaaacattacagcgacaacacatgttaaataaaacccccacttacaaagcagcatggccttattttctttaatcatccgttcaaaattactattaaatatttcccagccattaaaagaatacttctcgctcccaggatggttttgtaataaaacttttttcatcacattccctgttattacatactttagaggcgataattttatccatgcaaaaaaaatatccaacgaattttcttgatccgctggatatttcagaatatgactcgaatagcacgaaagattcactcgcttacgctatcgccccgcttccgacttcatctgctggcggactttttttcgcactacgtttacgcggtgcagcctttttcttatcagcactgccaccactgcccggagccacaatgccgcgaaactgccgcaccggcgtacgtttggcttgatcaataagctgatatagcgtccccaccagcggctgcataaagtcctgatagcgacactgcttttcgctgatttgcgtcagcacgctttcccagtgcgcggtcatgtccggtcgcgtcgccatctccggcaggctatggaatagcgcttttccggcgtcggtggagtggatatagcgcccttttttggtcaggaaaccacgcttgaacaacagttcaataatcccggcacgcgttgcctctgtccccagaccatcggtcgcacggaggatctttttcagatctttatcctgcacaaagcgcgcgatcccggtcatcgcgctaagcagtgttgcatcggtaaaatggcgcggcggctgggtttgccgctctaccacttcacctttttcacacagcaactcatcgcctttcgccaccacaggcagtggcgtgccgtcgttttcttcatcgcgctctttgctgcctaacagcgtgcgccagcctgcttcagcaagaaaacgcgctttagcgacaaatttgcctttggcaatgtccagttcgataacacacttgcggaacaccgcatccgggcagaattgcatcagatactgacgggcaatcaggttatagaccttcgcttcgttctccgtcaggttgatcgcagaactccgtgcggtcggaatgatggcgtggtgcgcatcgacctttttgtcatcccaacagcggttgcgtatatctggatctaccactggctgcggcaacagatccggtgcatgaacactgatggcattcatcaccgcgtggcgtccggcaaaatgttcttctggcaaatagcgacaatcagaacgcggataagtgattagcttgtgcgtttcgtacagtttctggcagatatcaagcacgttctgcgcactcagaccaaaacgttttgccgcttcaatctgcaacgcactaaggctaaaaggcagcggcgcggattcactttcccgtttatcgttatagctggtgacaatagccggttgaccactaatgcggttaaccacatgctccgccagtggacgatgtaacaagcgcccttcttcatcctggtacggttcacacgcttcgctcggttgccagatagcggtaaaccgctcatcggcaggtgtcacgatatgtgctttgacttcaaagaagtctttcgccacgaagttttcaatctcttcatcgcggcgcaccaccagcccaagcacgggcgtctgcacgcgtcccacggaaagtacgccctgataaccggcattgcgaccgagaatggtatacgcacgggtcatattgatgccgtacagccagtcggcacgcgctcgcgccagcgcagaaacgcacagcggtacaaactcactgttggaacgaagacggtcgatcgcccgctcaaccgcctgcgggttcaggtcgtttatcaagcaacgctgtacctgctggcgcttttccggtgccagttgcagatagtccagcacttcatccaccagcaattgcccttcacgatccgggtccccggcgtgaacgatttcgctggcttcatgcaggaaccgtttgatgacgttaagttgtttggtcacggagggtcggggctgtaattgccacttttccgggacaatcggcaaatccgcaagattccagcgcgcatagcggctgtcgtaggcgtctggctgcgcctgctcaagcaggtgaccgatacaccaggtcaccacctgaccattaccgcactcgataaagccatcgcctttccggtgcggtttgggcaggacatcagcaatggcgcgcgccagactcggtttttcggcaataaacaaccgcattgaattaacgaatctcaaccatggcacgaccgccgcgcgctggcaccagttcgccaattgccgtcagttcaatgccaaactcggcggctgtagctttgacctcattttctgcttccggcatgaccgccagcagcaaaccgccagaagtttgcggatcacacagcagatcgcgcacttcacgcggcatttcacccatcagatgaccgtagctggcaaagttacgttcagtgccgccaggtactgcgcccaacttaatgtactcttcaacaccggggagtttcgggatcgcttcatagtcgacgcgtgcctgcacaccagccccctgacacatttcgctcaagtggcccagcagaccaaagcccgtaacgtcggtcatcgcttttacgccttcgatgttggcaaaggacgcgcctgcgatgttcatccggcacatcacttccgtcgccagtccctgatgttctggtttcaacagactttttttctcagccgtggtaagaacgccgatccccagcggtttcgtcaggaacagtttgcatccggcttgtgcggtactgtttttcttcacccgctcggtcggtacgatccccgttaccgccagaccaaaaatcggctccggcgcatcgatggagtgaccgccagccagcgcaatacccgcctgacgacatgcatagcgtccaccttcggtcacttcgcgggcaatttctggggaaagtttgttaatcggccagccgaggatcgcaatcgccataatcggtttgccccccatcgcgaagatatcgctgatggcgttagtcgccgcaatgcggccaaaatcgaaaggattatcaacgatcggcataaagaagtcggtggtactgataacgctggtgccattgcccagatcgtacaccgccgcatcgtcgcgggtttcattacccacaagcaaattcggatcaacaaacttcgcctgctcactatgcaggatggtttccaacacttttggggaaattttacagccgcaaccagctccgtggctgtattgggtcaaacgaatgctgttctcgctcatggacatctcctgtcaatgcaatccgggtatggtaaccctcattccgtgaagtgataagtgagagtgtctgaattcctgcgcctttgctcacaatccagacagtttcgcgacaattatcagaaataagttacaaacggcgtcgggtccgggacgttaatgctcgtagatgctttcagctgcggcgtaccgaggtagagaaaaccgacaattttatcctgctcacggcaaccgaatgcttcacgcactaccggactttcagttaatgcgccactgcgccagatgccgccaaacccctgggcaactgctgccatttgcatcgccatgaccgcgcatccggcagacatttcctgttcccagcgcgggactttatgattctcttcgcatttcgccaccaccgtgatgatgagcggtgcgcggaacggcgcattacgggctttgtcgatagctttgtcatcactaccggcagcaatcgccccctgttccagtacggcgctgaaacgctcgcgcccttccccttcaatcacaaaaaaatgccacggttgcatggacttatggtccggcgcacgcatacccgcacgcaggatgttttgcagttgttcacccgttggcgcgggttcagccaagcgggaggcgctacggcgattgatcaatagttcgagtgcatccatttgattaactcctgtcgtgatatttattcacaaaattaacacgagagtggattttgttacagcacagtccgcaattcctgctgacaagtaccggttgggtcattacgataaccacatctattgcgcctgtgacaggtgtgaccttaagttgggagaatacatgcgaaccctttggcgatttattgccggattttttaaatggacgtggcgtctgctgaatttcgtccgtgaaatggtacttaacctgttctttattttcctcgtactggttggtgtggggatttggatgcaggtcagtggtggtgatagcaaagaaacggccagtcgtggcgcactgctgctggacatttctggtgtgatcgtcgataaacccgacagttctcagcggtttagtaaattaagccgccagctgcttggtgccagttccgatcgtctgcaggaaaacagtctgtttgatatcgtcaacactattcgccaggcgaaggacgaccgcaatatcaccggtattgtgatggatctgaaaaacttcgcaggcggcgaccaaccgtctatgcagtacatcggcaaagctctgaaagagtttcgtgacagcgggaaaccggtttatgccgttggcgagaactacagccaggggcaatattatctcgccagtttcgccaataaaatttggctgtctccgcaaggcgtggttgatctgcacggctttgccaccaacggtctgtactacaaaagcttgctggataagctgaaagtttccacccatgtgttccgcgtgggtacgtataaatctgccgttgaaccgtttattcgtgatgatatgagtccggcagcccgcgaagctgacagccgctggattggtgagctgtggcaaaactatctgaatactgttgccgctaaccggcagatccctgctgagcaggtattccctggcgcgcaagggttgcttgagggtttaaccaaaaccggtggcgataccgcgaaatatgcactggaaaacaagctggtcgatgcactggcaagcagtgcggaaatcgaaaaagcactgaccaaagaattcggctggagtaagactgataaaaattatcgcgccatcagttattacgattacgcattgaaaacgccggcagataccggtgacagcatcggtgtcgtctttgctaatggcgcaattatggatggcgaggaaactcaggggaatgttggcggtgataccactgcggcacaaatccgcgacgctcgccttgacccgaaagtgaaagcgattgtcctgcgtgttaatagcccaggcggcagcgttaccgcgtctgaagtgattcgcgctgaactggcagcagcccgggcagcgggtaagcctgtggttgtaagcatgggcggcatggcggcatctggtggttactggatttccacgccagctaattacattgtggctaaccccagcaccctgaccggttctatcggtatcttcggcgtgatcaccaccgtagaaaatagtctggatagcattggtgttcatactgatggtgtcagtactagtccgctggcggatgtttctatcaccagggcactgccgccggaagcgcagctgatgatgcagttaagcattgagaatggctataaacgctttatcacgctggttgctgatgcgcgtcatagcacgccggagcagattgataaaattgcccagggccacgtctggaccggtcaggatgcaaaagctaacgggctggtcgatagtctcggggatttcgatgatgcggtcgccaaagcagcagagctggcaaaagtgaaacagtggcatctggaatattacgttgatgaaccgaccttcttcgacaaagtgatggacaacatgtctggttctgtccgggcaatgttgccagatgcgttccaggccatgttacctgcaccgctggccagcgtagcctctaccgttaaaagtgaaagtgacaagctggccgcgtttaatgacccacaaaaccgttatgcgttttgcctgacctgcgccaacatgcgttaagtcttgtactgagtggccgacagatcgtcggccacattattttttacgtcgacgaatcctcttcccgctgtttcgccccatatttccttatccgcatagtatcaggtgcgctccccctgcctcacgtatatacttttgctctttcgatatcattcatatcaatatcatgcaaaagaaaagtatttacgttgcctacacgggcgggaccatcgggatgcagcgttccgagcagggttatataccggtgagtggtcatctacaacgccaactggcgctgatgccggaattccatcgcccggagatgccagatttcaccattcatgaatatacgccgctgatggattctagtgatatgacgccggaagactggcagcatattgctgaagatattaaagcgcactatgacgactatgatggttttgtcattctgcacggcaccgacacgatggcgtataccgcctctgcgctgagcttcatgctcgagaatctcggtaaaccggtcattgtgacagggagtcaaatcccgctggctgagttacgctctgacggacaaattaatctgctgaatgcgttgtacgttgcggcgaattatccgatcaacgaagtaacgctctttttcaataaccgattgtatcgcggcaaccgcactaccaaagcccatgccgatggttttgatgcgtttgcctctccaaaccttcctccgttactggaagcaggtatccatattcgtcgtttgaatacgccacccgccccgcacggtgaaggggaattaatcgttcatccaatcaccccacaaccaattggcgtagtgacgatttatccagggatttctgctgacgtcgtgcgcaattttctgcgccaaccggtgaaagcattgattctgcgctcctatggcgtgggtaatgcgccacaaaacaaagccttcctgcaggaattacaagaagccagcgatcgcggtattgtggtggtcaacctgacacaatgtatgtccggtaaagtgaacatgggtggttatgccaccggtaacgccctcgcccatgccggcgtaattggcggtgcagatatgactgtagaagccacgctaaccaaactgcattacctgcttagccaggaactggatactgaaaccattcgcaaggccatgagccaaaacctgcgcggcgaactgacgccggatgattaaggagactgtaatgccccctcgcgccctgttactggtcgatttacaaaatgatttctgtgctggtggcgcgctcgccgtgccggaaggtgacagtacggtggatgtcgctaaccgcctgattgactggtgccagagccgcggtgaagcggttatcgccagtcaggactggcacccggcgaatcacggcagttttgccagtcagcacggtgtagagccttatacgccaggccaactcgacggtttgccacaaaccttctggccagatcactgtgtgcagaacagtgaaggcgcacaattacatccgttactgcaccaaaaagcgatcgcagcggtgttccataaaggcgaaaatcctttagttgacagttacagtgccttttttgataacggccgtcggcagaaaacctctctcgatgactggttacgcgatcatgaaatcgatgaattgatcgttatgggcctggctactgactattgcgtgaagtttaccgtgctggacgcgttacagttaggttataaggtaaacgtgattaccgatggttgtcgtggcgtgaatatccagccccaggacagtgcgcacgcgtttatggagatgagtgcagctggggcaacgctatatacgctggcagactgggaagagacacaggggtaattttacgctggcctacaattctgtactggcattgtaggccaaataaaacacgtcagtggcacatctggcaattgatgccatcaacgaaagatttaattcacctcagaaatctcttccaagctcaccttccgcgtttcgatgccaaaaatggagagaaccagcgcacagagcaataacataacaccaagtaccataaacaccgtgatgctcccataatgtgttaataatgccgcaacgccatagggcgtgaagactgcgacgatccgtccgacggcattaacgaaaccgctaccgcgcaggcgtaaatgcgttggccaaagctccgggatataaaccgcgctcgcgaagcaaacatacatgtataaaaagaagatcatcaccagtccatagattaaaatcgcccactctgtagtctgaatactatagatatagcctaacacggcaataataataagtaaggtggagccaaataaccgacgaggaaaatgatcaataattaatgccgcaataaatattcctaccggagcgccaatcataataacagcggtcattaatatacttttatcgacatcaatgccggagttaacaaatatggtcggtatccatacggtgatggtataaaggctaatgttcattgcaattaaaacagtaatcgcgactaatgtacgtcgtaacatttcacctttaaacaggagccagaaagtacccttgattactttaaccttgctgttgctctgatagctagtaagcgggggtaaacgaatactcttctctctttcaatttgctgctctacttcacgaagttggcattctgcacctgcgatttgccctttccctgccagccatcgtgggctctcgataaagtatttaccactgagaaaccaggctaacagtatgccaataccacccagcagaaacattattcgccaactaaaaaaagcgataaccaccacgcctatcgccgcagacagcatggggctccagttaccaacaaaactgagccgcgcggaccattttccacgcaccgtcgcggggataaactccgtaaaactggcatagccaaccataatcagcgcccccattcctgttcccatcaggaagcgaaagaagatgagccagtacatatcagggacaaaagcggcccctgttgcagcaataccgacgatgagaagatttatgcgaaacgccctgcgccgcccaaagtagtcaccaataaacccaccagtaagactgccgatgaaataaccaaacattaatgcgctggtaaaggcggcattgaggaaattattactccatccattgcttaccagctttgctaagacgacattaccggagtaactcaaaaaccctgttaataacagactaaagcttataataccaaatatacgataatgaaaccgggccaaaggcaagcggtccagtcttgcgccaatttgatcatattgttccattaggtgcctcggatttgctaaaaaggtagcaattgcggcaaattcacttgccgcatctttatcatcattttatttcaaggcgcaggaacaaataatattgacaacgtgtgcttaaattaccacaccagctggatattattgtctttgcaaaatgctatccactctgcacccggacttttatcagttattatgtaattaatatgactaaaatcagctaactggacaaaagctttgcgatcaaacttagagtgatcaaccaataacgcaacttctgtcgcctgacggatcattgtctttttgatttcagcttccgcttcattagagtccagcgcgccgctgttaatatcaagacctttacaactcattaccatgatatcgacatgatagcgcctgatgatctctttagtaattcttccttgcagactaagtgtatttttgtttagttccccacccgtactaacgactttaatttcactctgagccagaacatgaatcgcttccgcgctgttggttagcaacgtcaggccactacggtcctgtaacaatttgagcaattccattacggtactactggaatcggctgccatggtggttttattgtcgataaagggtagtgccttgcgtgcaataagctgcttctcttcataaaagctactagcgcgcttataaaaatggatattctccgtcaacatcgctgtatttaaaacagcaccaccataggttctggtcaaaaagccttcatcttccagcttctcaagatcgcggcgaatggtttcttcggttacctgaaaaatcccactcaaattactgactgtcacctttttatcgttggcaaccatttgcttaattgcctgaatcctgtcttttgccgccacgattacacccctgtatctttttacatcacattagcgcgattatcgcataaccgatgtttactttcaaaataacctgtttgaatcacagattttcatcacagttttcacagaaacagaggtgaatcgtgttgagtatttaacgctccagggcctctgccatttccctcatcaatgttgcgtctgcatcgcttaagttgatattcagtgccgcgacattttcgcgtacctgttccggtgcagtagccccactaagaatggagattaaatcactctgttttaatatccacgccagtgccagagtgggaattgtgcactgataacgagcacaaagtggctgccactgttcaagcatatcaatcactttcagcatgttttcacgctggaaccagactttatttgcccgagcgccgcccggaacgtaatcacgagtgatggtgccggtcaacaatccctgctctagcggggaataaacctgaaccacaatgccattatcacgacatagtggcagcagttcgttttccattgcccggtcgaggatactgtatttcgcctgaataatatccagttcaccatattgcagatactcgcggatatggtcagcatcgacgttagcagcgcctatagcgcgaattttcccttcagactttaactcattaagcactgcgacagtttcagcgatcggcgtaaaaaatggcggcacgctctgccagtgcgtcatgtagatatcgatgtaatcaatacccagacgttgcaagctcgctgctacctcttcgcggatagattccggggaaaggtttttatacaactgccgatcgccaactttgttgaataaacttccttttcgttcccagacaatgccgcatttggtttctactacaacctgttcacggggcagtttttttaacgcctgaccgacgataacttcactattgccaaagttatatcctggcgcagtatcaatcagattaatgccacaacgatgggcttcaagaatcgtatcaatacatatttgccgatcgagatcgccattccatgcaggaccgccgccaatggcccatgtccccaaccccattcggctaagcgtaatatccgttgtgcctaaaggtatctttttcatttgccttcattatccttcgtattcttccagcaattgttcgaccagctttctgttttttacgccggtggtggcaccgacgcttagaacgctgatagccgccgttgcattggcaaagcgtgcgcattcacgcagatttttgccttctaacagtgccgcaataaaaccactagcaaagttatcgcccgcgccaatggtgtcgatggcggttattcctgcgaccgccggcaccttcatcgtcatgtcaccacgcttgataaagcagccgtctttacccgttttaatcaccaccgtttttacgccgcacgcaagaaagcagtcagcaatttcatccagtgtctctttcccggtgagtaattttgcctcggcaaaattaggaaacagataatcgacataactcaatgcttcgcaaatatcatccagcgtttcattcaaccgcggtttgatcatatcggcacagataatcatctgccgggctttagcttgcgtaaaaatttctgttagcgctttaccatccaatagtggactgttgaaaatactggccagacttaataatttcgcctgagaaaaccgcgcaaaatcaacatcgtcaatattcaatttccacagactgccattacggtttgtgacaaacgtccgctcgccatcctccgtcaccagtccaacgttaatagaggtatctatgctgacgtcctgcttcaggctttgaatatcaatattctctttgcggcaatggtcgagaataaattgccctgcggcatctttaccaatacgactcattaatgctgtgcgatggcccagacgagaaataattgttgcttcatttattgcatcacccccggtggtcattgcgattctttcaagaggataagaatccacatcaaagatatttttactgaccggttgcaatggaatatcaacaatagcggcacctatacaaataacgtcgagattatccatatcattattccgctttgccatcagaaccgaacagtttaattttttccaatgcccgttcttttacagctttacgtacttcacgttctaaatgcaggaaaggctgatcctggttttctttcactgcaaccattgcggcctgacagagctccgtatgaatgttgattttcgcgatacccaagctaattgcagttttaatgtcggcatcactgatcccgcttgcaccgtgcaaaaccagcggaacagaaacggcatcgcgtacgcgtttgacgacctcaaagttcaattgtggctcactcgtataaaccccatgctggttgccgatggcgacagccaaactatcacagcccgtacgttcaacaaattcagccgcctggtcaggatcggtatagtgatagcccgccagcgcttcctcataaacggtttcattaccgacatgccctaattccgcctctaccggaatacccagcggatggaagaaatcgacagcctctttggttaaacgaatattttcttcgaaatcaaacgcggaagcatcacgcattaaactattcataccatgagtccaggcgttatgaataatctccatactccgaccatgatcccaatgagttattaccggcaccgttgctttttgtgccatacttaccatcatgtgagagaaatcttcaaaactggtgttaccgacaaaacctgtaccaaaagaaataataaccggggatttcgcttcttcggctgcgtcgataacgcccatcaacatttctgcattccatacgttaaaatgggcaattgcataatgtttatttgtggcatcgttttcccaatatctgatatctgcgagcatgttctgttctcccgtattaattaatcgctaattttaataacgcctttaataatgtcgcgtttgttgttaacactctcttcaaatgcctgttgtacatcccgataatcgtaaatatgcgtcaccatgcttttcacatcgaatcgcccactagaaatagcttcaatcgtgaccggataacgattggcatagcggaataccgtctggatagtgacttcgcgattgattttgaggaaattgattgcgctatcgccgggtacagtaccaacaatcataattttaccgccgcgcattaccagataaggtgcctgtttaacggtgaccgcagaacccgctgtttcgaaaacaatatctgcgcccatgtcttcggtaaattgctgacagcgtgcaatagtgtcttcttttgcgccgttaataaccactgtcgcaccaagctgttccgccattgccagacgtttttccagcacatcaacgacggcaatttccgttgctcccaggcatttgcacgcttgcaacgtcatcaaaccaatacaacctgctcccagaataattatcttcttacccggtttaacatctgccagcatcgcggcatgcatcccgactgcggcaggctccaccagcgccccttccatcgtgtccatattgtcgggcagtttgtaagtaaagctctccggatgacacagatagtgcgttaatgcgccgcggtagttgggttgtgtcgccataaaatcaacgtccgggcagatgttatatttgccttccagacagtaacgacagtgaccgcaaggaacgccaggttcgatatttacccgatcccccggtttaaatttgcgcacgcggcttcccacagccacaaccgtcccggcgcattcatgacccaggccaatttcttgatttgggtctttaggcggaataaacgggccactttcaaaaccatgtacatcactaccacaaataccgacatattctactttaatcaaaacttcatcttctttaggcactggtatttctgcactaataattttcattgtgcccggcacctgcaatattgctttactatttttcattttgaatccacccgtattatttattggctactgcatcaatacttaaactttcaacggagacacctttggtttcgattccaatggtggcgatagcaattgcgacaataatactaaccgcccccagaagaataaagactcccgtaacgccataactactgagcagcactgcaacggcataaggtgcggcaataccactgattcgccctaccgcattcgccagaccggagccacggagtttggcctctgtcggccagatttcagggacatacactgcgctggcatagcaaacgtacatatagacgaaagtaatcaggaagaaaccaatcaacgttatgagcaacatactggtttgcagactatagatatatccgagcaccgcaatcaggattaatagccccacacccattgttttacgcggaattttatccatcaccagcatggcaataaaaataccaaatggcgcgccaaacatactcatggtatttaaaacaatgctgtcttttaaattaatcccctgggtcatgaatattgttggcaaccagttaattagtgtgtactgcacaacgttcatggcaatcagcacacaagagcctaatatcacgcgtttcagtaatactcctgtcagtaaggcactatacggcaccgcttgtggcgctttaccgtcatcagcaataaccacaggcggcaaaggtttacccgtctggcgtatgacgccttcttctatactccgcatgactttctcggcttcctgataccgtccgcggctttccagccagcgcggggattcaggaaagtagcgccaggccagcgccgtagcgataaggctcaatattgcagggataagcagttgtacccgccagttccactctgcactaatcagcggcgtgagtcccatcgctatcaaactacagagcggataactccagttgccaataaaggaaacccgactactccacgttccacgatttctaccgggcatatattcggtgaaaccagcaaacagcgtaaccagtaaagctcccagcccaactcccatcacaaaacggcaggcaataaggaaatccatattcggactgaaagcaccgacaaccatgctggcaatatgaatggcctcatagaggatgaacgcatttctgcgaccggttttgtcgccaatgatgccgcccaccagcgcaccgagaaacattccggcggtcgtgattgcactgaatgtggctgtggtggaattatctgtccagcccaacgctttcagctgcgcgaggatcaagccaccaacggcattactccagcagacaagcaagccaaacgcgacgatggcaaacatactactatgccagcggcaatccggtaagcgatccagccgtgcaccacaatgcggttttgttatctgttccatgcgataacgttccttcaggagagtggttattcatcaaagtcgtaagtcatgatcactttgattgcggttttatcgaccatcgcatcaaacccttcgcgccattggctcaggccgatacgatgcgtgatcatcggtttgactttgatagcgccgctggctaatagcctgatagcgttacgccaactggtggagtcataggccatatgcccaatgatgcttttgttccaggcggtaatgtcattaatgctgaaatcaagaggtttgaagcccattccaacgcgtaccacttccccgttcgggcggagcatttcgatggcttgtttcagtgcgatattggcaccggagcattcaatcaccagtcccagattgtctttgccacaaatttgctggcagcgcgccaccacatcttcggtagaaccatttactactgccgtcgcacccagttcttttgcaaccgggaagcggaccgccacatcttcttgcagaccaacgacgacgatatttaccgcccccataattcgcgccatttgtacggagaacagcccgagtgggccagtgccgatgacgaccacatcctgaccaggaaggaatttgctttgctgcgcgatggatttgtaggcattacagatagggtcaagtacggctgcgtcctcataatcaacaccatcagggatttcccacaacgcatgacgatgaattttgagaatttcaccaggaaccagacaatatttggaaaaaccaccgccccaggtattattatccagaccaaggtttactttttctgtacaacacagaaaatcaccttgttcacaggccggacaaacaccgcaaacgtgaccgctgttatcgcttacgacgcgttgccccactttccagtctttgactttttcaccaacctgcgcaatacaacctgcgaactcatggccgcggatagagttaaactcatcagaaccgctatcgacattgtagtgcttcatgtctgcgccgcagattgccgcggctttaatttcaatcactacatcttccgggccacacatgggttgtgggacatcaatcatcttgtagccgccaaaggccttgccaaaccgagccagtgctttcattgcgtcatcctctgtgtttagttttgcttagatggccatcatacttacccacatgatttttgaggtcaacattaaatctgtaaaacacagataatgatctgcgttttacaactcagatcacaattacgcagaaaatggctgggtctgttacaggttgatggaaggcggggcgcaaaaagagcaaattcgagagggattaccggccaaataggtctgagacttaagttcaggagaagtcattcaggtgtgaacgggacggcaagagatcggactgggacttagccaggtcatggcgagataattgagatgagtcgtggggtcattgttggctatccccttcatagccgaggcaaaaaggggatgaaccacttacttaaacatggcaataggctttgcactgataccaaaatcttcttttaactgctgtttgctcttcatgaccatctgaccatttgtgtcaattgtcatatgctgtgcttcgatattatggcgggcttgccacagcatcaccagttgcaggcagttctctttttgttcctcggtcaacgcaacgccatcaggccatttccccagttcaacggcggtgctcaaacgctggtatacctcaggcatcatgctgttgataatgtcatcaagattcataatttttccgctcctgtggaataagttgctgaatcgttttttcaaccgttgatttcttcgccgttttcgccatcggtaaagcgtaaagaggcagagttaacacaataacgttcgcccgttggctgcggcccgtcggggaagacatgccccagatgggcatcacagttaccgcaacgaatttctatgcgctgcattccatgactcaagtctttgatataacgaatggattcttcacttaccggttcgtagaaactgggccagccacagccggaatcatacttggtttgggaatgaaacagcggggcatcgcagatcaaacagtgatatacgccgtcacgcttgttatgcagtaaacgacccgtaaatggcggctctgtcccatgattctgcgtcacgtaaaactgcatctcggacaaattttttttcagttcttctgcgctaggtttattagccatttgctcacatctcactttaatcgtgctcacattacgtgactgattctaacaaaacattaacaccaactggcaaaattttgtcctaaacttgatctcgacgaaatggctgcacctaaatcgtgatgaaaatcacatttttatcgtaattgccctttaaaattcggggcgccgaccccatgtggtctcaagcccaaaggaagagtgaggcgagtcagtcgcgtaatgcttaggcacaggattgatttgtcgcaatgattgacacgattccgcttgacgctgcgtaaggtttttgtaattttacaggcaaccttttattcactaacaaatagctggtggaatatatgactatcaaagtaggtatcaacggttttggccgtatcggtcgcattgttttccgtgctgctcagaaacgttctgacatcgagatcgttgcaatcaacgacctgttagacgctgattacatggcatacatgctgaaatatgactccactcacggccgtttcgacggtaccgttgaagtgaaagacggtcatctgatcgttaacggtaaaaaaatccgtgttaccgctgaacgtgatccggctaacctgaaatgggacgaagttggtgttgacgttgtcgctgaagcaactggtctgttcctgactgacgaaactgctcgtaaacacatcaccgctggtgcgaagaaagtggttatgactggtccgtctaaagacaacactccgatgttcgttaaaggcgctaacttcgacaaatatgctggccaggacatcgtttccaacgcttcctgcaccaccaactgcctggctccgctggctaaagttatcaacgataacttcggcatcatcgaaggtctgatgaccaccgttcacgctactaccgctactcagaaaaccgttgatggcccgtctcacaaagactggcgcggcggccgcggcgcttcccagaacatcatcccgtcctctaccggtgctgctaaagctgtaggtaaagtactgccagaactgaatggcaaactgactggtatggcgttccgcgttccgaccccgaacgtatctgtagttgacctgaccgttcgtctggaaaaagctgcaacttacgagcagatcaaagctgccgttaaagctgctgctgaaggcgaaatgaaaggcgttctgggctacaccgaagatgacgtagtatctaccgatttcaacggcgaagtttgcacttccgtgttcgatgctaaagctggtatcgctctgaacgacaacttcgtgaaactggtatcctggtacgacaacgaaaccggttactccaacaaagttctggacctgatcgctcacatctccaaataagttgagatgacactgtgatctaaaaagagcgacttcggtcgctcttttttttacctgataaaatgaagttaaaggactgcgtcatgattaagaaaatttttgcccttccggtcatcgaacaaatctcccctgtcctctcccgtcgtaaactggatgaactggacctcattgtggtcgatcatccccaggtaaaagcctcttttgcattacagggcgcacaccttctcagctggaaacctgcgggtgaagaagaagttctgtggttgagcaacaacacaccgttcaaaaatggcgtcgctattcgcggtggcgtaccggtttgctggccgtggtttggtccggcggcacaacaaggtctgcctgcgcacggttttgcccgcaacctgccgtggacgctgaaaagtcatcatgaagatgctgatggcgtagcgctgacttttgaattgacgcaaagcgaagagacgaaaaaattctggccgcacgactttacgctgttagcgcatttccgcgtgggtaaaacttgtgaaatcgatcttgaaagtcatggcgaatttgaaaccacctctgccctgcatacctactttaacgtgggtgatatcgctaaggtaagcgtcagtgggctgggcgatcgcttcattgataaagtgaatgacgcgaaagaaaatgtactgaccgatggtattcagaccttccctgaccgtaccgatcgcgtgtatctgaatccacaagattgcagcgtgattaatgatgaagcgctgaatcgtattatcgccgtaggccaccagcatcatctgaacgttgtcggctggaacccgggaccggcgcttagtattagcatgggcgatatgccggatgatggctacaaaacatttgtttgtgtagaaacggcttacgctagtgaaacgcaaaaagtgaccaaagagaaacctgcacatctggcgcaatccattcgcgttgcgaaacgttaatttacgttaatgttgtgtgccgggtgcaatgcatccggcacacaacatcacaccatatccagcgcagtttttccttttggtgccggatatgccttatccagcatagctaattccgcactagaaagttcgacctcaagcacagccgcattttgttggacatgggcaatcgtggccgcttttggaatcgccatcacaccctgatgactgatcacccacgccaacaatacttgtgccgcgctgatattgtgagcatgtgcaatttcgttgactaccgcgttttttaacagtccattgcgcaaccgcccggcctgggctaacggactgtaagccatcaccggcatctgctgttgctggcaccaggggagtagatcgtactcaattcctcgactaccgagatggtaaagcacctgattagtggcacactgatttccccccggcagctgccagagttcctgcatatcagcataatcaaggttagaaacgccccagcggcggatttttccctgggcgatcaatttttccatcgctgcgacagtctcttcaaaagcgaaactgccagaccagtgtaataagtaaagatcgagataatcagtattgagacggcgtaaactggcttcgcatgcatttatcgctttttgcccgccagcattccacggatagactttagagacgagaaagaccttctctcgcagaccggttaatgcttccccaaccaccttttcggcaccgccatcggcatacatttcggcggtatcaatgagggttaaaccgagttcaatgcccgcgcgtagtgcagcaacttctgttttgcgctgactggcatcttcgcccatataccatgttccctgccctacggctggcagactgacatcgccactaaattgaatcattttttgttgcattgtttcctcccaggtattgcaccaccgtaatgcaaaacagggcgtgacgccctgtttttatgcacaaaatgccctggaaagatgcattatcagaatttgtaggtgatcccggtagaaatcaggccagtccaggatttatccaccatcgggctgtcagtaacttcatcagacagacgggtgtagcgtgcggtaccgtaaacactccagtcgccgaggaagttgtagctggcgctcagctccaggtaagggctccagctgtcgttcgggttatagccacgcagaccgctgcgagcggactctttgcggcttacgccataatagtattcgttctggttttcgctgttccactgcacaccaatacccggagtcacggtcaggccaccgttggtgtaacgatacaaccaggccatatcccagacgatgccgttgctgttatccagggtatcgccagccagggtggtacgcaggtaaccgtactgggtaaagtgagcataagacagaccagccatcatggtgctcttacggtcatccaggtgacgcatttggtgatcgccactgtctttcgctttgaagtaaagcgggctccagtaagcggtaatactaagtttatccgttgcgtcattccacaggtagtaaccaccacctaagccacggaaccagaagttatcgccttcatagttgattaccggtactgggtaaacatcggtatcgtaatctttatatgggtgttcaacgacacctacgcctgcgcccagggaaaatttaccttcagcgtgcgctacgcctgcagacgttgcgataagcactccaagtgccagaagtttgagtttggtcacaattaatcattccttaaacaaatgtttagcgggcgacaaagtttacccgtcaatacatcgaaacccaacctttttacgttttcattttttaaagtaactgtttaattttcctgacgcggatgacaccgcgcttacagccaaatgaatttagcgttactggcgagcctggtctttacattaattatgcaaaatttatggatgagttgttgatatgccattgaaattaagaaagccgtgcaggcaagttttccatttgccatctacgcttaattttgaaggtgtatcaccgggcacgttgttctcatcgtcgataaaatggcatgagagttgctgtgttttagcaagagacgtcgttcagtttacctcttccgggagcctctactattcatatgaacggctcttaacctgtgctaaaaaacgaaaggacggcataccatgaatatattcgatcactatcgccagcgatatgaagctgccaaggacgaagagttcacactgcaggagtttcttaccacttgtcggcaagatcgcagtgcttatgccaacgcggctgagcggctattgatggctatcggtgagcctgtcatggtcgatacagcccaggaacccagactttctcgactcttttctaaccgggtcattgcacgttatccggcgtttgaagagttttacggcatggaagacgcgattgaacagattgtctcttatctgaaacacgcggctcaggggctggaagagaagaaacaaatcctgtatctgctggggcctgtgggtgggggtaaaagtagccttgctgagcgactgaaaagtttaatgcagctcgtaccgatttatgtattgagcgcgaacggtgagcgtagcccggtcaacgatcatccgttctgtcttttcaatccgcaggaagatgcgcagattctggaaaaagagtatggcattcctcgccgttatctcggcaccatcatgagcccgtgggcggcaaaacgcctgcatgaatttggtggcgatatcactaagttccgggtagtgaaggtctggccgagtattctgcaacaaattgctatcgccaaaacggaacccggcgatgagaacaaccaggacatctccgcgctggttgggaaagtcgatattcgtaaactcgaacactacgcgcagaatgacccggacgcctacggctattccggtgcgctgtgccgcgccaatcaggggatcatggaattcgttgagatgtttaaagcaccgattaaagtgctgcatcccttgttaaccgccactcaggaaggtaactacaacgggacggaaggtatctccgccctgccgttcaacgggattattctcgcacacagcaacgagtccgaatgggtcactttccgtaataacaaaaacaacgaagccttcctcgatcgtgtttacatcgtgaaggtgccgtattgcttgcgcatttccgaagagatcaaaatctacgagaaattgcttaatcacagtgaattgactcacgccccatgcgcccctggcacgctcgaaacactgagtcgtttttccattcttagccgcctgaaagagccagaaaactccagcatttatagtaagatgcgggtttatgatggcgaaagtctgaaagacaccgatcccaaagccaagagctatcaggaatatcgtgactacgccggtgtcgatgaagggatgaacggtctgagcacgcgttttgcgtttaagatcctctcccgcgtgttcaacttcgatcatgtagaagtggcagcaaacccggtccatctgttctacgtcctggaacagcagattgagcgcgagcagttcccacaagagcaggcagaacgctatctggagttcctgaaaggttatctgatcccgaaatatgccgagtttatcggcaaagagatccagacggcctaccttgaatcctattccgaatatgggcaaaacattttcgaccgttatgttacctacgcggatttctggattcaggatcaggagtatcgcgatccggataccgggcagctgtttgaccgcgagtctcttaacgccgagctggagaaaatcgagaaaccggcggggatcagtaatccaaaagatttccgcaacgagattgttaacttcgtactgcgcgccagagcgaataacagcggacgcaatccgaactggaccagctatgaaaaactgcgcacggtcatcgagaagaaaatgttctccaataccgaggagctgttgccggttatcagctttaacgccaaaacgagtaccgacgagcagaagaaacacgacgactttgtcgaccgtatgatggaaaaaggctacacccgtaaacaggtgcgtttactgtgcgaatggtatttgcgcgtacgtaaaagctcttaacaaccctggcccggtacacatgttaccgggcctacaacgacagcgaaccgtgggcctgagaagcggcaacacaggcgtagcatacagttggcaaatgtagtacggggggcatatgacctggtttattgaccggcgtctgaacggcaaaaacaaaagcatggtgaatcgccagcgttttttacgccgttataaagcgcaaattaaacagagcatctccgaggccattaataagcgtagcgtgactgacgtcgacagcggcgaatccgtatccattcccacggaagatattagcgaaccgatgtttcatcaggggcgtggcggtctgcgccaccgcgtgcatccgggcaatgaccatttcgtccagaacgaccgaattgaacgtccccagggtggcggcggaggttccggcagtggtcagggccaggccagccaggatggtgaaggtcaggatgaatttgtctttcagattagcaaagatgagtatcttgatctgctctttgaagatttggccttaccgaatctgaaacaaaaccaacaacgccagctgaccgaatataaaacgcatcgggcgggttataccgctaacggcgttccggccaatatcagcgttgtgcgtagtttgcagaacagtctggcgcgacgcacagccatgacggcaggcaagcggcgggaacttcatgcactggaagagaatttggccatcatcagcaacagtgaacctgcgcaactgctggaagaggaacgtctgcgcaaagaaattgcagaattacgtgccaaaattgaacgcgtcccttttattgacaccttcgatttacgttacaagaactacgagaagcggcccgatccctccagccaggcagtgatgttttgcctgatggacgtttccggtagtatggatcaatccactaaagatatggctaagcgtttttatattctgctgtatctgttcctcagcagaacgtataagaacgtggaagtcgtatacatccgccatcatacccaggcgaaagaagtcgatgaacatgagtttttctacagccaggaaacaggcggcaccattgtttccagcgccctgaaactgatggatgaggtagtgaaagagcgttataacccggcacagtggaatatttacgctgcacaagcaagcgacggcgataactgggccgatgactctccgctttgccatgaaatcctggcgaaaaaattattacctgttgttcgttattacagctatatcgaaattacccgtcgtgcacatcagacattgtggcgagaatatgagcatctgcaatctactttcgacaactttgcgatgcagcacatccgcgaccaggatgatatttatccggtgttccgtgaactgtttcataaacaaaatgcaacagctaaaggctaaaactatcagccaggtcattatcgcctggctgatttttagcttactgtaaattatctcatttattacatacattagcttacaatcgctttaaatatgacagcataacctttacataatttagttccagaaaacaatcattcggaaaaatgattcagagtacacgtatttccatggggttattctttaaatattttttaagcttaacgaaaattgatcctggtcaaaactatatatctctgccaagtataaaatccagcactcacattgctctcctttttatggtttctatgggtacacaaaaattaaaagctcaaagcttttttattttcagtttattgctgacgttaattttattttgcattactaccttatataacgaaaacacaaatgtaaaactcatcccacagatgaattacctgatggttgttgtggctttgtttttccttaacgccgtcatttttcttttcatgttaatgaaatatttcactaacaaacaaattttaccaacactcattttaagccttgcatttttaagtggccttatctatttagttgaaaccattgtaattatccataaaccaattaacggcagtacactgatccagacaaagagcaatgatgtttctattttctatattttccgccaactcagttttatttgtttaaccagcctggcgctcttttgttatggaaaagacaacatccttgacaacaataagaaaaaaacgggaatcctgttgctggcgctgatcccttttttagtttttccccttctggcacacaatctgagcagttataacgctgactattctttgtatgtcgtcgattactgtccggacaaccatactgcgacctggggaatcaactatacaaaaatattggtttgtctgtgggcatttttactgttctttattatcatgcgcacacgattagccagcgaactatggccgttaatagcattattatgtctggcaagcctatgctgcaacttacttctactgactctggatgagtataattatactatctggtatatcagtcgcgggattgaagtttccagtaaactgtttgttgtgtcttttctgatttataacatttttcaggagctgcaactctccagcaaactggcagttcatgatgtgctgaccaatatttataatcggcgctactttttcaacagcgtagagagtttattgagccgacctgttgttaaggacttctgtgtcatgctggttgatattaatcagttcaaacgcatcaatgcccaatggggacatcgtgtgggtgataaagtgctggttagtattgtcgatattatccagcaaagcatccgccccgatgatattttagcgcgactggagggtgaggtgtttggcttgctatttaccgaactcaatagtgcccaggcaaaaatcattgcggaacgtatgcgtaaaaatgtcgaactcctgaccggctttagtaacagatatgatgttcctgaacaaatgaccatcagtattggcacggtttttagtacgggtgacacgcgtaatatcagccttgtcatgacggaagcagataaagccttacgcgaagcgaaaagcgaggggggcaacaaagtgattattcatcatatttaagtgcaaaaatattcagagccatgctttttgcgtggcttttgcatacaatttattactattacccctaaatttcccctccccagcggcgcagagatgagtataattagcgcccctgtgccaggccgcaatcgaactttatctggttttctcgtttcactaaccgaaggagatgcgtataaagcttccgatgagcgtttatatgtcaataagcagaacaaaaacagccgttcatgataaccttctgtggttgtttgcttgtaatctcaggagcgtgaaatgactgaaatggctaaaggaagcgtgacgcatcagcggttaatcgctttattaagtcaagaaggtgctgacttccgcgtcgttacccatgaagcggtaggtaaatgtgaagcggtgagtgaaattcgtggcaccgctctaggccagggtgctaaggcactggtatgtaaagtcaaaggcaatggcgtaaatcaacatgttctggcgatcctcgcagccgatcaacaggccgatctgagccaactcgccagccatataggcggattacgcgctagcttggccagcccggcggaagtcgatgaactcacaggctgtgtcttcggcgcgatcccccctttcagcttccatccaaaactcaaactggttgccgaccctctactcttcgaacgatttgatgaaatcgccttcaatgcaggcatgctggataaatccgttattttgaaaaccgcggattatttgcgcattgcgcaaccagaactggtcaatttccgccgcactgcgtaattagccggtccgttcgataagaagaacggacaaaaccagtacaacagcaatggcaaaaaagctactcgtgataatcagtgtctcgacaaacatttgatcgttcatagcatgcccccgggagatagctgttttcacgttattgttagcgtgcacaaatggcagtttgatgacagttcgcctgattttttatgcaaaaaacgtaaagattttctacttccttcctgcagcaagcgtaaagtaagcaggcttattattttttggcaaggaaaccacgatgtttgatgtcactttgctgatcctgctcgggttagctgcgctgggctttatcagtcataacaccactgtcgccgttagtattctggtgttaatcattgtccgcgtcacaccgttaagcaccttttttccgtggattgaaaaacaggggctaagtatcgggataatcattctgacgattggcgttatggcccccatcgccagcgggacgctaccgcccagtaccttgattcacagctttctgaactggaaaagtctggtggcgattgcagtaggcgtgattgtctcctggctgggtgggcgcggcgtgacgttaatgggcagccagccgcaactggtcgccgggctgctggtaggcactgttttaggcgtagcgctgtttcgcggcgtaccggttgggccgcttattgccgcgggtctggttagcctgattgtggggaaacagtaattattgccgcgggtctggtttcgcactttgtggggaaacagtagttaatctcgcaatatatcggcctggcgtttgccccaggcctttcttaaacatagtaataaaggccgttgtactatcataccccagcgtatgagcaactttctgtacagtatcgcctttcactaatccctgaagcgccataatcagctgtaactgctgacgccactggcgaaaactcaaccccgtctcttttactatcagtcgggcaagattgcgttcactcatcgcaaaaaagccagcccattgccccaatgccccccactcgacaggccctttcgccatcatctccaccatcgtgcggattttaggatgagaagaaacgggcaggtgcagctgttgttgtggctgctgagggagttcatcaaacaggacctgaattaatctgcgggtcattggctcagcacgctgagtcgtcgtcctgtttgccagggttaaaattaattcccggcataaggggcttattttcaatgtgcaacatgttgtcggcattgtcactgcgctgggttcgataaacagaaaacagagttcagcattagctgttacttgattgctatgttccaccccgcccggtatccaaaccgcatattgtggcggcaccatccacaaagcattttccaccgtacaggtaattgcaccatgtagcgccagtatcagctgtcctttgcggtgctgatgtacaggactggttaactcatccgttccggcgtgaatacaaaatgcgaccgcggcttcatggtgtcggtcgggttcatagccattgagattcaacctgtgcatcattttgtccgaacttagcgataatttgtcattttagcttgattcaacataacaataaaaacggtaaggtacagcctcgtttgtaacaatgagaagcatatgacctgtagtactagtttaagcggcaaaaacaggattgtccttatcgctggcattctgatgattgccacaacattacgcgtcacctttaccggcgcagcaccgttactggatacgattcgttccgcttacagcctgacgacagcgcaaaccggcttattgaccaccctgccattattggcctttgcgctaatcagtcctttggctgccccggtagcgcgacgttttggtatggaacgtagcctgtttgccgcgttacttttgatctgtgctggtatcgcaattcgctctctccctagcccttacttattatttggcggtacagcggtcattggcggtgggattgcattaggcaatgtcttactgccaggattaattaaacgcgatttccctcattccgtcgccagacttaccggcgcatattccctgacaatgggagctgcagcggcactgggaagcgctatggtcgtgccgctggctttgaacggttttggctggcaaggcgcgttgctcatgctgatgtgttttcctctgctggctctttttttatggctgccacagtggcgaagtcaacaacatgcaaatttgagtaccagccgcgccttacatactcggggtatctggcgtagtccgcttgcctggcaggtcacattgtttcttgggatcaacagtctggtctattacgtgattattggctggcttccggcgatcctcatcagtcacggctatagcgaagcacaggcgggtagtctgcatggtttgctgcaactagccacagcagcacccggtttgctgatcccacttttcttacatcatgtgaaagatcagcgtggtattgcagcgttcgttgccttgatgtgcgcagtgggcgcggttgggctctgctttatgccagcgcacgcgatcacctggactctgcttttcggttttggttccggcgcaacaatgatactggggttgacgttcattggtctgcgggctagttctgcgcatcaggcggcggcactcagcgggatggcacaatccgtcgggtatttgttggcagcctgtgggccgccgctgatgggtaaaatacacgatgctaacggtaactggtctgtaccacttatgggtgttgccatacttagtctactgatggcgattttcggactttgcgccgggagagacaaagaaattcgctaatatccggtgctatagtgacgtaacaaatcatgcgtgaaagggagaacaaacacgatgaatattcagtgcaaacgcgtttatgatccggctgaacagagcgatggttatcgcatactggtcgaccgcctctggccgcgcggtatcaaaaaaaccgatttagcccttgatgagtgggataaagaaatcacgccgagtacggaactgcgcaaagcctttcacggcgaagtcgtcgattatgcaacctttcgcgagcaatatcttgcagaactggcgcaacacgagcaagaaggaaagcggctggcggacatcgccaaaaaacagccgctgaccctgctctacagtgcaaaaaacaccacgcagaaccatgcgctggtgctggccgactggctacgtagcttgtgattttagtacagcatccggcggttatttttcaccagccggatggtcacgccgccacaatgcccattcatcaatcgtttcaccgcccggtaatttgcaattgttgctgaccccttgcgctgtctgcactggaatgagcgtcccgcccttctgctggcaatagacgctcgccggatttgccataccaatctgcggcggtttaggtgcttctggctgagaaggggtactacaaccagccaggaccagcaagcaaggcagaacaaaactgataattttcatttattgatctcacatatttatccaagattagagtatcgcggtatcgttttgttttgcagcactatttttattacattcactcaaaacatattacgtcttgtttcatctttgttgatgatgttttatcatgcctgcaaagattaaataatcagcatttacccgccgtatcctggagttgttccgtgagtgatcagattatcgcccgcgtcagccaatcccttgccaaagaacagagtctggaaagtctggtccgacagcttctggagatgctggaaatggtcactgatatggaaagtacctacctgaccaaagtggatgtcgaagcgcgcctgcagcatattatgtttgcccgtaacagccagaaaatgtacatcccggagaattttaccgtcagctgggattacagcttatgcaaacgcgccattgatgaaaactgctttttcagcgatgaagtccccgaccgttggggtgactgtattgcggcacgcaatcttggcatcaccacatttctgagcacgccaattcacttaccggatggaagtttctatggcacgctttgcgccgccagcagtgagaagcgccagtggagtgaacgcgcggaacaggttttacagttattcgccggactgattgcacaatatattcaaaaagaggcactggttgaacagctgcgcgaagccaatgctgcgctgattgcgcaaagctataccgacagcttaaccgggctaccgaatcggcgggcgatttttgaaaatctgacgacactgttttccctcgcccggcatcttaaccataagataatgatcgcgtttatcgatctggataacttcaaattaatcaatgatcgttttggtcataatagtggcgatctgtttctcattcaggttggcgagcgccttaatacgctccagcaaaatggcgaagttattggtcgtctcggcggtgatgagtttttagttgttagtctaaacaacgagaatgcggatattagcagcctgcgagaacgcattcagcagcaaatacgtggagaatatcacttaggtgatgttgatttgtattatcccggtgccagtcttggcatagtagaagtcgatcctgaaacaaccgatgcagacagtgccctgcatgctgccgatattgcgatgtatcaggagaaaaaacacaaacagaaaacaccttttgtcgcgcatccagcgctacattcctgaggcgtattcacatccttttgattggtgataacatgcgaatcggtattatttttccggttgtaatcttcattacagcggtcgtatttttagcatggttttttattggcggctatgctgccccgggagcataaagatgaaaaaaacaacgattattatgatgggtgtggcgattattgtcgtactcggcactgagctgggatggtggtaacgtcacctctaaaaaatagcaaaggctgcctgtgtgcagcctttgtgcaatttaagcgttaacttttaatcttcctgtagataaatagcacgacaatcgcaccaataacggcaaccacgaagctgccaaaattgaagccatcgactttaccaaagccaaacagcgtgctgatccatccgccgactacggcaccgactatccccagcaggatagtcataaagaatccacctccatctttacctggcatgatccacttcgccagaataccggcaataagcccaaaaataatccaactcagaatgcccattgtttcctcacttatctgttttgcattagcgggttagtcgctgataaaaagcatagcacaacatcgggagggcaagatttgtgacgagcatcacggaggttttttttgcgatggcgcagaaattgcgccatcaacgatcagtgataattaccaaccacaaacatcatgttcgttttccgtgtcataagaacgtacggtattcaccagatcttttatcacttcagccgccacttctggcaccagcaaagtcatcggcgtctctgtttcataatcgacagaaacgccattgctgttattggtgacggtcacggtatacgttgctttgcccatgattcatttcccgttatgaatgactttccgttgttgcgcaccttccatcaggacttcaggagccacgaagaagtcaatgttgaaataagtatcgtcagtcatggcttcaatgttgtgccacttttctggagggaacaccgcaaactgccccgcttcgataaggatcacctgatcaggctctgcactgtgttcatcagcgtagccgagatatttgaccgccccatgcataacggaaaggcgtgggtaaacccccgggcgcgttcctttatcaagatgacgttcgaatattccggcaggtgcagtttgtttattccagaaaggcgtactgcgcgtatgaatataattctgtgggatttgaagcatccttttccctccttcggtgaatgcgctgaaaacggtttattccagccgtttcagggtacgcctgataatttgcattttaaataccatttattggttactttttagcaccatatcagcgaagaatcagggaggattatagatgggaagcccgcgacaacgcgggctgaaagcatcaggattgcagcgtcgccagtcgggcagcgaaacccacgaacatcaaaccaatcagactgttgccaactttagccagtttctttttggtacgtatgtactgcgtgacaaaagcaccagatataatcaggaagctcaaatagcagaaactcaccagttccagcgtcgccgccagaataaagaaactaattcccgtatgtggggcattaacatcgataaactgtacgaaaaagctcacatagaacaaaatggctttcggattagtcaggctcaaaattaacgcgcgtttaaaaatagcaccgtattggggctcatcggatttggcctcgctatttttacccttcagggtcgcgtaaagaattttactccccagatagagcaaataaaacgcaccaagataacgtacaatgttgaataatatcggggtggtcttaattaatgtcgccactccagcccatgccagaaacatcaataccgcatcgccaataaatacaccgcaggccgcaagataaccgcctttcataccgctactgacgctatttttgagtacaaacagggtatttggccctggcaccaacacaataaaaatggccccaaccagataggtccagtaattcagaaccccgtattcagcgaacacattaacctctttaattatctttcgatcatgcgcgattaaaggtgaatatgctaaccaatctgtagcggcttagaaaggagaaaatcaggttttaacctgatatcaacccgataattgaatcattaatcaggcatgctccagactaaaattcgggtagtgctcggcaaaatactggcgtaaaaattctaccgttatccgcactttcgcactcgtcgccagcctactaacataaacggcccagacgttcgctggctggtaatattccggtagcacttgcactaaatgaccactggcaatgttttcgctaacatcccaccaggaacgcagagcaatcccctgcccatcgagacaccactgatggacaatttctccatgattagagctcagtgggccggtgactttaatcgcatgggggccttctttattgcgtaattgccagacaccaaaaggatgatcgcgctctttaatgaccaggcacggcaatgcagaaagatcggttaaatgtttcggcgcgccatgttgcgcaataaattccgggctcgcgcagagaatacggtaattggtcgccagtttgcgggcgattaaattaggggcgatgtcatcgccaatgcgaatatcgagatcgacaccttcattgaccaaatcgaccagtcggtcttccacatcaaaacgtaattccagttgcggatacgccttcgccagcgctaataacgccggagccaccacctgtcgtccaaaaccaaagctgctgataatacgcagcatcccctgcggcacctgacgcacgtcagaaagttcgtccatcatctgaccgacatcctgcaaaatccgctgcgcccattcataaatccgctctccttcttcggtaatggtgacgcggcgggtggtgcggtgtaacaacaccacgtttagcgtttgctccagcaaggcgatgcgcttgctgacgaacgccggactaacgcccagttcttccgccacggcggcaaaaccagcccggcgagccaccagcataaagacgcgcaaatcattcagcagcggtaaattattcatgattcgtgttttatgtttcaccagttacggggattaattccttttcagtcaattataggatggtgatgttgtcaattttgatggtcaggaagtgagaacccaatgatgaaaacgatgcgtattgctgcgatcccgggagacgggattggcaaagaagtccttcctgaagggattcgcgtgttacaggctgccgctgagcgctggggcttcgccttgagttttgagcaaatggagtgggcgagctgcgagtattacagccatcacggtaaaatgatgccggacgactggcatgagcaacttagccgtttcgacgccatctattttggtgccgtcggctggccggataccgttccggaccatattagcttgtggggtagcctgctgaaatttcgtcgtgaattcgaccagtacgtcaacctgcgcccggttcgtctctttcctggcgttccctgcccgctggcgggaaaacagcctggcgacatcgatttttacgtggtcagggaaaacaccgaaggcgaatattccagcctcggcggtagagtgaatgaaggtacagagcatgaagtcgtcattcaggaaagcgtatttacccgccgtggtgtcgatcgcattttgcgttatgccttcgaacttgcgcaaagccgtccacgtaagacactaacttctgccactaaaagcaacggtttagccatcagcatgccgtactgggatgagcgagtggaagcaatggccgagaattacccggagatccgctgggacaagcagcatattgatattctctgcgcgcgttttgtgatgcagccggaacgattcgatgtggtggtggcgtccaatttgtttggcgatatcctttccgatcttggcccggcctgcaccggcaccattggcattgccccatccgccaacctgaatccggaacgcactttcccgagcctcttcgagcctgtccacggttccgcgccggatatctacgggaaaaatattgctaaccctatcgccacgatttgggccggggcaatgatgctcgattttctcggcaatggcgatgagcgtttccagcaagcgcataacggtattctggcagcaattgaagaagtgattgctcacgggccgaaaacacctgatatgaaaggcaatgccaccacgccacaggttgccgacgcgatttgcaaaattattttgcgttaaggtcaaaccagtttatttgaaccgcgtcactgacgcggtttttttattcgttctttgcagtaaataacctgcgtcatttcaccttttattgtttccgtttcgtgttttatggctttccgtattcttaattgtttaatttatgtaacatgcaaattttgttacgcgtacgttaggttccgccgtacaggtattggttttgctggcaatgggactggtgatttatttagccaccagtaaatacggcaatattcgtcttggcgaaggaaaaccggaatacagcacgctctcctggctgtttatgtttatttgtgccggtttaggttcttctacgctttattggggggttgctgaatgggcctattattatcaaacacctggattaaatatcgcaccgcgtagtcaacaggcactcgaatttagcgttccctactctttcttccactggggcatcagcgcctgggcaacttatacgctggccagtttaatcatggcttatcactttcatgtgcggaaaaacaaaggtctgagcctttccggcattattgctgctattaccggcgttcgcccgcaaggcccatggggaaaactggtcgatttgatgttcctgatcgccactgtcggcgcactgaccatttcccttgttgttaccgcagcaacctttacccgtgggctttccgcgctgaccggtttacccgataacttcaccgtgcaggcatttgtgatcctgctttccggcggcattttttgcctaagcagctggattggtatcaacaacggtttgcaacgtctgagcaaaatggttggctggggcgcgttcctgctgccattactggtgctgattgtcggcccaaccgaatttattaccaacagcatcatcaatgccatcggcctgaccacgcaaaacttcctgcaaatgagcttattcaccgatccgcttggcgatggtagttttacccgcaactggaccgttttctactggctgtggtggatcagttacacccctggcgtagcaatgtttgtcacccgcgtttcccgcggtcgtaagattaaagaagttatctggggactgatcctcggcagcaccgtcggttgctggttcttctttggcgtaatggaaagctatgccattcatcagtttatcaatggcgtaatcaacgtcccacaggtgctggaaacactgggcggcgaaacagctgtacagcaagttctgatgagcttgccagccggtaaattgttcctcgccgcatacctgggcgtgatgattattttccttgccagccatatggatgcagtggcctacaccatggcggcgaccagtacgcgtaatctccaggaaggtgacgatcctgaccgtgggctgcgtcttttctggtgcgtggtgatcactctgatcccgctttccatcttgtttaccggtgctagcctggaaacgatgaaaaccaccgtcgtgctcacagcccttcccttcctcgtcattttactggtgaaagtcggcgggtttattcgctggctgaaacaggattacgccgacattccggctcatcaagttgaacattatctcccgcagacaccggttgaagccctggaaaaaacgccagtgctccctgcgggaaccgtattcaaaggcgacaactgagcgccatcatcctaacgataaaggtatccctatgagcaatctgagccctgactttgtactacccgaaaatttttgcgctaacccgcaagaggcgtggaccattcctgcccgtttttataccgatcagaacgcgtttgaacacgaaaaagagaacgtcttcgccaaaagctggatttgcgtcgctcacagcagcgaactggcgaatgccaatgattatgtgacgcgtgagatcattggcgaaagcatcgtgctggtacgcggtcgtgataaggttttgcgcgcgttctataacgtgtgtccgcaccgtggtcatcagttgttgagcggtgaaggaaaagcaaaaaatgtgattacctgcccgtatcacgcatgggcattcaaactcgatggcaacctggcccatgcacgtaactgcgaaaacgtcgccaatttcgatagcgacaaagcgcaactggttccggtgcgtctggaagaatatgccggattcgtcttcatcaacatggaccccaacgccaccagcgtagaagatcaattacccggcctgggcgcgaaagtgctggaagcctgcccggaagtccacgatctgaaactggcggcccgctttaccacccgcacgcctgccaactggaagaacattgtcgataactatctcgagtgctatcactgtggtccggcgcatccaggtttctccgactccgtacaggttgatcgttactggcacaccatgcacggtaactggacgctgcaatacggtttcgccaaaccgtccgaacagagctttaaatttgaagagggtacggatgcggcattccacggtttctggctgtggccgtgcacgatgctgaacgtcaccccgatcaaagggatgatgacggtcatttatgaattcccggtggattctgaaactaccctgcaaaactacgatatttacttcaccaatgaagagttaaccgacgagcaaaaaagcctgattgagtggtatcgcgatgtgttccgtccggaagatttacgtctggttgaaagcgtacagaaagggctgaaaagccgtggctatcgtggtcaggggcgcatcatggccgacagtagcggtagtggcatttccgaacatggtatcgcccatttccataatctgctggcgcaggtgtttaaggactaatgacatcggcggcggtattttccgccgctgggctgatttttgatggagtacagcaatgagtgactatcaaatgtttgaagtacaggtgagccaggttgaaccccttaccgaacaggtgaaacgcttcacgctggtggcaaccgatggcaaaccattacctgcgtttaccggaggaagtcacgtcattgtgcagatgagcgatggtgataaccagtacagcaatgcgtatagtctactgagtagcccgcatgacacctcttgttatcagattgccgttcggctggaggaaaacagccgcggcggttcccgctttttgcatcagcaggtaaaagtgggcgatcggttaacgattagtacgcctaataacctgtttgcgctaattcccagtgccagaaagcatctgtttatcgcgggcggtattggtatcacccctttcctgagccacatggcagagctgcaacacagcgacgtcgactggcagctacattactgcagccgaaatccagaaagttgcgcatttcgtgatgagctagtccagcatccgcaggctgagaaagtccatttgcatcatagtagtaccggaacacgactggaattagcgcgattattggcggatatcgaacctggcacacacgtttatacctgtggccccgaggcgctaattgaagcggtaagaagtgaagctgcgcgtctggacatcgccgccgatacgctgcactttgagcaatttgctatcgaagacaaaaccggcgatgcatttaccctggtgcttgcccgttccggaaaagagtttgtggtgccggaagagatgactattttgcaggttattgaaaataataaagccgcgaaagtggaatgtttatgtcgtgaaggggtatgcggaacctgcgaaacagcaatactggaaggtgaagctgaccatcgggatcaatattttagcgatgaagagcgtgccagccagcaaagtatgttgatctgttgtagccgtgcgaagggtaaacgcctggtgttggatttgtaatttgccgaagccggatgtggcgctgagcgcgcccagtccggcttcggaagattttactgcggatattcctgcaataaattgtgtaatgcttccgccatcagctcaccacgccagccggaaatcagctccggcaaattgttctgcggtttcagtttccagtgccagttcagcagttggttgatttgccgacggcttgccagcaattcggcgctgatcttatgcgtttcgctcacgtcagtaatcaggctcttaatcgctttaaacgctttacgataacccggcatgtccatcaggttaagcatcggctgcggtaaggcatcttccggcaatgtctgcgctttttccaccagcgctagcagcgttttaccgtgaaagcggatttcgctaccggataaacccaggctgtccagttcgcctaaacttcccggcatataacgcgctacgctccacaaatgctcttcacgcacgacaaagttcaccgccagatcgcgctctcgcgccttgcgcagtcgccagtcggctaacagttgcagacaggccagttggcgtgtgcgtaattgccaggcattggtgatatcacgccaggcatcttccggcgcaacgacttcctgacgacgcatttgcatcaggcggcattcatccagcgccgcaggtagccagccggaggcctccgtttctaccataagcttggcggtgatcggtaacagataccagacatccgccgctgcgtattcacactgacgttcggtcagcggtctggccagccagtcggtgcggctttcactcttgtccagcgtaacgccggaatactcttccaccatggaagcgaaaccccaactcatcgggcgtccgcagaaggcagcaaggatttgcgtgtcaatcaagggttgtggtaattcgccaaagacattgaggaacacttccagatcttcactgcctgcatggagaaattttgtgatggacggatcgcgcaggatcgctttcagcggactccagtcggtgatcccgagtggatcgattagcgccagatgctcgccatcgaaaagttgaatcaaccccagctgcgggtaataagtgcgcgtacgaacaaattcagtatccagggctatcgccggaaaggcacggacggcttcacacaaagaagccagcgcatcgtccgtggtaatcatttggtaattcaaattgttttctctttagtgggcgtcaaaaaaaacgccggattaaccggcgtctgacgactgacttaacgctcaggctttattgtccactttgccgcgcgcttcgtcacgtaattctcgtcgcaaaatttttccgacgttagatttcggtaactcatcacgaaactccaccagcttcggtactttgtatcccgtgagctgacggcggcaaaaagtcaccagactctcttcggtaaggcttggatcttttttcactacgaagattttcaccgcttcaccactggagccggaaggtacgccaacagccgcgacttcctgtacgccaggatgctgcatgacgacatcttcaatctcgttgggatagacgttaaaaccggaaaccagaatcatgtcttttttacgatcgacaatgcgcaggaatccttcttcatccattaccgcgatgtcgccggtgtgtaaccagccatttttgatgatttcatcggtagcatcgggacgctgccagtaacccagcatcacctgcggtcctttgacacaaagctcacccggttgacctggtggtacttcattatcatcatcatccaccagtttggcttccgtgctcggcaccggcaaaccgatgctaccactatgataatcaatatcatatgggttaacgctgaccagcggcgcacactcggtaaggccatagccttccagcagatactgtccggtcagtttcacccaacgctctgccaccacttgctgcactggcatcccaccgcctgcggaaagatgcagactggagaaatccagctgctggaactctttattgttcagcaacgcattgaacaaggtgttaacgcccgtgatagcggtaaacggatatttcgctaactcttttaccaaccctggaatatcgcgcgggttagtgataagcaggttctgcccacccagttcgataaacagcaggcagttaatggtcagggcaaaaatgtgatacagcggcagcgccgtcaccaccagctctttgcccggatgcaacagcggaccataggtcgcgttaacctgttccaggttcgccagcatattgcggtgagtcagcatcgcgcctttcgccacaccagtggtgccgccggtgtattgcagaaaagctaaatcttccggcaccagttcgggtttgacgtactgcatccggtagccgttatgcagtgcgctacgaaaactaatggcatctggcagatggtatttcggcaccaaacgcttgatgtatttaacaacgaaattgactaccgtgccttttgccgtagatagctgatcgcccatacgggtcagaattacgtgctgaacggcggttttatcaaccactttttccagtgtgtgagcaaagttagacacgataacaatcgcgcttgcgccgctatcgttaagctgatgctcaagctcacgcggggtatacaacgggttaacgtttacgacgatcatcccggcacgcaaaatgccaaacagcgccaccggatattgcaataaattaggcatcatcaacgcaacgcgatcgcctttcttcagccccaacccttgttgcaaataagcggcaaacgcgcgactgcgttcttccagcttgcggaaggtcattacctcccccatattcacaaacgcaggttgatcggcgtagcgcgcgacgctctgctcaaacatatctaccagagattgataacggtcagggttgatctccgtcggaacgtccgcgggataacggttaagccaaaccttcttcaattcttcacctctaaaatgcgtgttcgtcgtcatcgcaaccccaaatgatatacatgccgttaacataatattaactcatcataccagcttgataattacccaacgaaaaggttgcgaagcgcgtcactatttatttttatctttaccgtaagaatgcagaaacagcggaccagccgctgtttctttttctttaaaaacaagcaattattcagttacaactgtttgtactctcgcggggccgggattataccagccccatccgccgtagccatagggccagccacgaccgccataaaaccatggatcaatcggctgaggcggcataatcacctgctgggttaaatgccaacgtttgtaacccgttacttgcatcaccataaatttatagggcgtattgccgattttgccgtcaaccgcaccagtgattggcccgactaccgtaaccagttgtccacggaaatccaccgggtccagaaaaccgttcacatcggcataaatgcgaccgcgagaaggttctcccagcgtcggtctggctccgctgtccagcggtacggtagcaatttccaggcgagttttcccttgctggttttgtaccgcaaccactttgccaccaaagcgtgcctcctgaccaacgtacagctgcggcgcactcatcacccgaactaaatcttgttgcggcgtgggactgctgcctttaatggcgtccggcacagtgacacaaccgctcagcattagcgcaaacgtacctgccagtatgcctttgataacattcttttgaaccgccatggtgcgactcctttttttctcagggcatactcttaagattcattctttgcccggaagtttcttccatgcgacgttgttacgtaaataaaccggttcggcatgttccaccgccaccgttttaccctcagcaaacatctgacacgcaatcggcagcatatcttcagcagcaggcagtaacacttcgccatcgcgcaaaaccagcccgctctctttaccgagatccggccaagcttgccagcccgtccctaccgtcacccattcgccggaaagctgttgcattcgttcatggacgatttcgggtttgagtacggcttcggtttcttcaccgtgccagataccgttttcatcacgctgatattcggcccagtaaacttcgcccattcgcgcgtcaatggctgccagcacgcgggttgcgccgtttttgcgccacgccccttgcgccatcgtcattagcgtggagacgccaatcatcggtaattccgcgccaagcgccagcccttgcgcgatgccaataccaatgcgcacgccagtaaagctaccggggccgcgcccgtaagccagagcgttaatatcagtcagggaagttccgctggtggtcaggatatcctgcaccatcggtaagattcgttgagtatgttcacgagggcaaagctcaaaatgagcgttgacagtaccgtcgttccacagggcgacagagcaggcctctgtcgcggtatcgatagccagaattcgcatgggtcttcgtgcttagatcaataaaaaggcgcgcatcataccatactccgtaacaaattacctggaggatggtatcgcaaggaaacgaaccgcacgggcaatgtcacgggtgcgtggcgcgggcggcagactggcgagaaacgtcgcgccgtaaggacgcatcaccagccgattgtcacaaatcaccagcacgccacgatcgtcggcgtcgcgaatcagtcgccctaccccctgtttgagagtaatgacggcatctggtagttgcacttcatcgaacgggtcgccaccgcgcaaacgacaatcttccatgcgcgcttttaacagtggatcatccgggctggtaaacggcaatttgtcgataattaccaaactcaatgtatcgccacgcacgtccaccccttcccagaaactgctggttgccacaagaagcgcattaccggcgctgacaaattgctgcaacagttgccctttgctggtttccccctgcaacaatacaggaagcgtcatggtagcgcggaactgctcggccagatcgcgcatcatggcgtggctggtacaaagcataaaacaacgaccgttgttagcttcgatgatcggtcgcagcattgccgctaactggcgagcagaacctggctggttggtttgcggcagattgcgcagcacacagagtaacgcctggcggctgtaatcaaatgggctgggcaacagcaagctctcggcctgttcgatgccaagccggctggtgaaatgatgcagatcgtcgttcacgctcagcgttgcactggtgaagatccagctaccgggtttttgcgccattaactctttgaatttatccgccacgctgagcggcgtgagagccagagtaaaatggcggctagtgcattcgtaccagtagctgtagcccggctgattgatctcttttagccgcttcagccgtgtgcgatacaacgtggcgcgctcaaatgccgcatccagcaaggcggaacgccccagactcagtttcgccacgtcataacaaagttccagggtgtcatcgagcagtaaaaatgcccgctgaatttgcggattagctaacagctcacgcaggttaccgcgataacctggctcaccgagttgcagacgaaaatcctgcgcactctgggcaagacgatcagcgcacttttgtaactgctgggtgtcttttaattcggtgcggtaggcgatggtgatgtcttttgccaggtcgagcagttgtcgactggagagactctgaccaaaatactggctggcaatgtccggtagctggtgggcttcgtcgaagatcatgacgtccgcttccgggatcagttcgccaaatccactctctttaaccaccatatccgccagaaagagatgatggtttaccaccaccacatcggcgtccatcgcttttttacgtgctttgaccacaaagcaatctttatacatcgggcagtcgctgccaagacagttgtcgttggtgctggtgaccagcggccacgcctgactatcttccgccacgctgacgcaggtgctgatatcaccatcgactgtttgattagaccaggagcgcagcaggatcacatcgcttaagatttgtaccggcagatcgccccccgccagcgcctgctgttcgagacgttcgaggcagaggtagttactgcgccctttcagcagcgccacgttgcccgtatatttcaatgccttactgactgttggcaaatcgcggctgtagagctgatcctgcaacgctttactgccggtgctgataatgactttctttttcgcccgcagcgcaggagccaggtaagcgtaggttttgcccgtaccggttcctgcttccaccaccagcggctggcctttttctatcgcctgggtgacggctaccgccatctgtcgctgtggttctcgcggcttaaagcctggtatcgctttcgccagctgaccgtctggtgcaaaatcgtccgtcacactaccccctgttgatttgaacagggattatgtcaggatgagggcgctttcgccagttgaagtggtgacggcgacctcacattgtggcagtctttgcagcacgaaaatggaagtataatgaggacaaaatgatgactatcgttcgtatcgatgctgaagcccgctggtctgatgtagtaatccacaacaacacgctctactacactggtgtaccggaaaacctcgacgccgatgcctttgagcaaaccgccaacacgctggcacagattgacgccgtgctggaaaaacagggcagcaataaaagcagcattctggatgccaccattttcctggccgataaaaacgacttcgcggcgatgaataaagcgtgggatgcttgggttgtcgcgggtcatgcgccggtgcgctgcacggtacaagcgggtttgatgaacccgaagtataaagttgaaattaagattgtggctgcggtgtaagctttatcgaagcaaaataagtcagacgataatttatcgataatactggtcggttttacataaatcgaccagagaataagatattactgttgatgcttctgctaattcattatttatatttataatttcaattttatctataaaactaactatataaataaacataaacatgccgttgtgttcgccctttgattagcaactctggttttctttcttagctgaacaatctggttatagcgtgcggactgaccgttaaatttctccatcttactggataacacaccatgagctgctacctttaaaacacctgaatgtcaacaggttaactcgtgccatatcgttataatccctttgatattagatgcaaattaaggtcatatatagccttatcgataacatggttaattttaaggataagaatatgcctgctgtaatagataaagccctggatttcattggtgccatggatgtaagtgcgccaacaccaagtagcatgaatgaaagcacggcgaagggaatctttaaatatttaaaagaactgggagtacccgcgagtgccgctgatattacggcgcgagctgaccaggaaggctggaaccctgggttcacggaaaaaatggttggatgggcaaaaaaaatggagacaggtgaacgttctgtgattaaaaatcctgaatactttagtacatatatgcaggaagaactaaaagcactggtctgagttaaatttatatcagcataaatgggtcaggacgcttttaatcacatataaaaagcgtcctttttctcacaatcaaatgatcatcggcttctataacgaaatcgatacggattagtgtgttactcgtcttcatcctcaaaacgcgccacgattcgctcgccggagtggttggcacgcagctcttctgccaccagcgcgattgcctggccgctgctcatcccttgtgccatcagttcctggatccgctcgacagctttttgctgctgttcatgggtgagactaggtaaacctgcaaacattgttaactcctgctaaattgttggcgctaattatttcatgctacccggcacatagccagtagagtcaggactgatgaagacgttatctcccgctgtgattactttactctggcgtcaggacgccgctgaattttatttctcccgcttaagccacctgccgtgggcgatgcttttacactccggctatgccgatcatccgtatagccgctttgatattgtggtcgccgagccgatttgcactttaaccactttcggtaaagaaaccgttgttagtgaaagcgaaaaacgcacaacgaccactgatgacccgctacaggtgctccagcaggtgctggatcgcgcagacattcgcccaacgcataacgaagatttgccatttcagggcggcgcactggggttgtttggctacgatctgggccgccgttttgagagtctgccagaaattgcggaacaagatatcgttctgccggatatggcagtgggtatctacgattgggcgctcattgtcgaccaccagcgtcatacagtttctttgctgagtcataatgatgtcaatgcccgtcgggcctggctggaaagccagcaattcagcccgcaggaagatttcacgctcacttccgactggcaatccaatatgacccgcgagcagtacggcgaaaaatttcgccaggtacaggaatatctgcacagcggtgattgctatcaggtgaatctcgcccaacgttttcatgcgacctattctggcgatgaatggcaggcattccttcagcttaatcaggccaaccgcgcgccatttagcgcttttttacgtcttgaacagggtgcaattttaagccttagcccagagcggtttattctttgtgataatagtgaaatccagacccgcccgattaaaggcacgctaccacgcctgcccgatcctcaggaagatagcaaacaagcagtaaaactggcgaacagtgcgaaagatcgtgccgaaaatctgatgattgtcgatttaatgcgtaatgatatcggtcgtgttgccgtagcaggtagcgtaaaagtaccagagctgttcgtggtggaacccttccctgccgtgcatcatctggtcagcaccataacggcgcaactaccagaacagttacacgccagcgatctgctgcgcgcagcttttcctggtggcagtataaccggggctccgaaagtacgggctatggaaattatcgacgaactggaaccgcagcgacgcaatgcctggtgcggcagcattggctatttgagcttttgcggcaacatggataccagtattactatccgcacgctgactgccattaacggacaaattttctgctctgcgggcggtggaattgtcgccgatagccaggaagaagcggaatatcaggaaacttttgataaagttaatcgtatcctgaagcaactggagaagtaagacgtggaataccgtagcctgacgcttgatgattttttaagccgctttcaacttttgcgcccgcaaattaaccgggaaaccctaaatcatcgtcaggctgctgtgttaatccccatcgtccgtcgaccgcaaccggggttgttgctgactcagcgtagcattcatctgcgtaaacacgctggacaagtggcattccctggaggtgcagtcgatgacacggacgcaagtgctatcgccgccgcgctgcgcgaagctgaagaagaggtcgctataccgccttccgccgttgaagttatcggcgtgctgccgcccgtcgatagcgtcactggctaccaggtaaccccagtggtcggcattatcccgcccgatctgccgtatcgcgccagtgaagatgaagtcagcgcggtgtttgaaatgccgctcgcccaggcattacatctgggtcgttatcaccctttagatatctaccgccgtggtgatagtcatcgggtatggctgtcctggtacgaacagtattttgtatggggaatgaccgcaggcataattcgtgagctggcgctgcaaattggtgtgaaaccctgactatacttatctttacatctacaaaacactacttgagacaatcatcgcaatattagttaaatcgcggtttttgattagtttaattcatgtgaatagttaagccagtcgccgcgttccctcttacactatgcgctgttattagttcgttactggaagtccagtcaccttgtcaggagtattatcgtgattagtctattcgacatgtttaaggtggggattggtcccagttcttcccataccgtagggcctatgaaggcaggtaaacagttcgtcgatgatctggtcgaaaaaggcttactggatagcgttactcgcgttgccgtggacgtttatggtagtctgagcctgacgggtaaaggccaccacaccgatatcgccattattatgggtcttgcaggtaacgaacctgccaccgtggatatcgacagtattcccggttttattcgcgacgtagaagagcgcgaacgtctgctgctggcacagggacggcatgaagtggatttcccgcgcgacaacgggatgcgttttcataacggcaacctgccgctgcatgaaaacggtatgcaaatccacgcctataacggcgatgaagtcgtctacagcaaaacttattattccatcggcggcggttttatcgtcgatgaagaacactttggtcaggatgctgccaacgaagtaagcgtgccgtatccgttcaaatctgccaccgaactgctcgcgtactgtaatgaaaccggctatagcctgtctggtctcgctatgcagaacgaactggcgctgcacagcaagaaagagatcgacgagtatttcgcgcatgtctggcaaaccatgcaggcatgtatcgatcgcgggatgaacaccgaaggtgtactgccaggcccgctgcgcgtgccacgtcgtgcgtctgccctgcgccggatgctggtttccagcgataaactgtctaacgatccgatgaatgtcattgactgggtaaacatgtttgcgctggcagttaacgaagaaaacgccgccggtggtcgtgtggtaactgcgccaaccaacggtgcctgcggtatcgttccggcagtgctggcttactatgaccactttattgaaagcgtcagcccggacatctatacccgttactttatggcagcgggcgcgattggtgcattgtataaaatgaacgcctctatttccggtgcggaagttggttgccagggcgaagtgggtgttgcctgtagtatggctgctgcgggtcttgcagaactgctgggcggtagcccggaacaggtttgcgtggcggcggaaattggcatggaacacaaccttggtttaacctgcgacccggttgcagggcaggttcaggtgccgtgcattgagcgtaatgccattgcctctgtgaaggcgattaacgccgcgcggatggctctgcgccgcaccagtgcaccgcgcgtcagcctggataaggtcatcgaaacgatgtacgaaaccggtaaggatatgaacgccaaataccgcgaaaccagtcgcggtggtctggcaatcaaagtccagtgtgactaatacttcttactcgcccatctgcaacggatgggcgaatttatacccgctttctcgtctgctgtaatattccccactacacttccactgttgcgtcaggcgtttgtcgccatacgcttacagggtggcccgcatgcaaaaagcacaacggatcattaaaacctatcgtcgtaatcgaatgattgtttgtacgatttgcgcactcgttacgctcgctagcaccctgagcgtgcgatttattagtcagcgtaacttaaatcaacaacgggtagtacaattcgccaatcacgctgtagaggaattagataaagtactgcttcccctacaggcaggtagcgaagtcttgcttccgctgattggtctgccctgctctgtcgcccatttgccattacgtaaacaggcggcaaaactccaaactgtgcgatccattggcctggtgcaagacggcacactttattgctccagcatttttggttatcgcaatgtgcccgtcgtggacattctggctgaacttcctgcaccgcaaccacttttacgcctgacgatcgaccgtgccctgattaaaggcagtccggttttgattcaatggacgcctgcagcgggcagtagcaatgctggggtcatggagatgattaacatcgacttactgacggcaatgctgcttgagccacaactgccgcaaatcagtagcgccagcctgacggtggacaaacggcatttgctctatggtaatgggctggtagattcccttccgcaacctgaagacaatgaaaactatcaggtttctagccaacgctttccttttaccattaacgttaatggtccgggggctacggcgctggcatggcactatcttccaacacaattaccgctggcggtgctgctaagtttactggtgggctacatcgcctggctggcgaccgcttaccgaatgagcttttcccgcgaaatcaatctgggcctggcgcaacatgagttcgaattgttctgtcagcctttgcttaatgcgcgcagccagcaatgtattggtgtagagattttgctgcgctggaacaatccgcgtcagggctggattagtccggatgtgtttattcctatcgcggaagaacatcatttaattgtgccactgacccgctatgtgatggcagaaaccattcgtcagcgccatgttttcccgatgagtagtcagtttcatgttggcattaacgtcgcacccagccattttcgccgtggtgtgctgataaaagatctcaatcagtactggtttagcgctcacccgattcagcaactgatcctcgaaatcaccgaacgcgatgccttactggatgttgattatcggattgcccgcgagctgcatcgtaaaaacgtcaaactggcgattgatgacttcggcaccggcaacagcagcttttcctggcttgaaacattacgtcctgacgtgctgaaaattgataagagttttaccgcagctataggttctgacgcggttaacagcacggtgaccgatatcatcatcgcgctggggcaaagactgaatattgaactggtggcggagggcgtggaaacgcaagaacaggcgaagtatttgcgccgtcatggcgtgcatattttgcaagggtatttgtacgcacagccgatgccgctacgtgattttcccaaatggctggcgggcagccaaccgccgcccgcccggcataatggacatatcacgcccattatgccgttacgttaacgcttactcatcttcatcgtgcgccggttgctctttaacaatgcgaaccagatcaacacgataatcattggcttcaatgatggtgatatgcagtggccctacatcaatcacatcgcccacacggggaatgtgaccatttgcgctgatcacgaggcccgcgaccgtcgcgatatcatcgtcatcggcaaggtgctcaacatcaagcgcctgctgcaaggcatgcaaatctgtaccgccttttaccagccagccgtcaccatcagtaatgatttccggcgtttcgtcagcgtccgggaattcacccgcaatggcttccagcacatccagcggcgtgaccagaccttgtaccacaccaaactcgttggtcacgataacaaagctcccgcgagcacgacgcagcacgcccaacaggttgatcggatcgagggtttccgggacgataatcgccggagacgcgctagcaatcgccgccacatcaacgccctcttccagcgccaccagcagttctttagcacgtacaataccgatgatttcatccagttcaccgcgacataccgggaacagactgtgcggactagagagcagttgctcgcggatttcatcgaccccgagattagcgtcaacccagcttatttcaccgcgcggcgtcatgatcccgcgcagagaacggctcgccagcgtcagtacgccgttaatcatgtaacgttcttcttcggcaaatgcaccttccgggatcggcatcggcatcgggttatcggcatcgtgctgaacattggcctgacgtttcccgcccatcaaacgcaggatggcatcggcagtacgcgctcgcagcggcaaagtgctctggtggcgaataaagttgcgacgcgcaatctggttaaacacttcgatgatgatgctgaagccaatcgcggcatacaggtaacctttcggaatgtggaaaccgaaaccttctgccaccagactcagaccaatcattaacaggaagctcagacagagcaccaccaccgtggggtgctggttaacgaatcgcgtcagcggtttggatgccagcaacataaccgccatcgcaatcactaccgccgccatcatcaccggcagatggttaaccatccctactgcagtaattaccgcatccaagctgaagacggcgtcaaggatgacaatctgtgtgacgaccacccagaaactggcgtagcctttaccgtggccggaatcatgatcgcggttttccagccgttcatgcagttcggttgttgctttgaacagcaagaatatccccccgaacaacataatcaggtcgcgtccggagaaggagaaatccatgacggtaaatagcggtttggtcagcgtgaccatccaactaatcaggctcagcagccccagacgcataatcagcgccagacttaaccccagcaaacgcgctttatcgcgttgttttggcggcagtttgtcagcaagaatggcgatgaagaccaggttatcgatacccagcacaatttcgagaacaacaagcgtgagtagccccgcccaaatactggggtccattaagaattccatgacaagctcctgcttaaggaatagctattcgacgccagaaataatgcaggcgtaacgacaaaatgcaaacgaaaggtgcggcatagagtgccagaaaggcaggcgttaaaaggcctgatgctgaaatgacgtcggtgacgatccatactgcgggctactgccctatactccatggttgttaaacgggagttaaacatatcagagacgcctctgatttggcaaagatttaccttcctttgcaaacgaatgtgacaaggatattttacctttcgaaatttctgctaatcgaaagttaaattacggatcttcatcacataaaataattttttcgatatctaaaataaatcgcgaaacgcaggggtttttggttgtagcccttatctgaatcgattcgattgtggacgacgattcaaaaatacatctggcacgttgaggtgttaacgataataaaggaggtagcaagtgaccattgctattgttataggcacacatggttgggctgcagagcagttgcttaaaacggcagaaatgctgttaggcgagcaggaaaacgtcggctggatcgatttcgttccaggtgaaaatgccgaaacgctgattgaaaagtacaacgctcagttggcaaaactcgacaccactaaaggcgtgctgtttctcgttgatacatggggaggcagcccgttcaatgctgccagccgcattgtcgtcgacaaagagcattatgaagtcattgcaggcgttaacattccaatgctcgtggaaacgttaatggcccgtgatgatgacccaagctttgatgaactggtggcactggcagtagaaacaggccgtgaaggcgtgaaagcactgaaagccaaaccggttgaaaaagccgcgccagcacccgctgccgcagcaccaaaagcggctccaactccggcaaaaccaatggggccaaacgactacatggttattggccttgcgcgtatcgacgaccgtctgattcacggtcaggtcgccacccgctggaccaaagaaaccaatgtctcccgtattattgttgttagtgatgaagtggctgcggataccgttcgtaagacactgctcacccaggttgcacctccgggcgtaacagcacacgtagttgatgttgccaaaatgattcgcgtctacaacaacccgaaatatgctggcgaacgcgtaatgctgttatttaccaacccaacagatgtagagcgtctcgttgaaggcggcgtgaaaatcacctctgttaacgtcggtggtatggcattccgtcagggtaaaacccaggtgaataacgcggttagcgttgatgaaaaagatatcgaggcgttcaagaaactgaatgcgcgcggtattgagctggaagtccgtaaggtttccaccgatccgaaactgaaaatgatggatctgatcagcaaaatcgataagtaacgtattgtgttgattatcactcagttttcacacttaagtcttacgtaaacaggagaagtacaatggagattaccactcttcaaattgtgctggtatttatcgtagcctgtatcgcaggtatgggaagtatcctcgatgaatttcagtttcaccgtccgctaatcgcgtgtaccctggtgggtatcgttcttggggatatgaaaaccggtattattatcggtggtacgctggaaatgatcgcgctgggctggatgaacatcggtgctgcagttgcgcctgacgccgctctggcttctatcatttctaccattctggttatcgcaggtcatcagagcattggtgcaggtatcgcactggcaatccctctggccgctgcgggccaggtactgaccatcatcgttcgtactattaccgttgctttccagcacgctgcggataaggctgctgataacggcaacctgacagcgatttcctggatccacgtttcttctctgttcctgcaagcaatgcgtgtggctattccggccgtcatcgttgcgctgtctgttggtaccagcgaagtacagaacatgctgaatgcgattccggaagtggtgaccaatggtctgaatatcgccggtggcatgatcgtggtggttggttatgcgatggttatcaacatgatgcgtgctggctacctgatgccgttcttctacctcggcttcgtaaccgcagcattcaccaactttaacctggttgctctgggtgtgattggtactgttatggcagtgctctacatccaacttagcccgaaatacaaccgcgtagccggtgcgcctgctcaggcagctggtaacaacgatctcgataacgaactggactaacaggtgagcgaaatggttgatacaactcaaactaccaccgagaaaaaactcactcaaagtgatattcgtggcgtcttcctgcgttctaacctcttccagggtagttggaacttcgaacgtatgcaggcactgggtttctgcttctctatggtaccggcaattcgtcgcctctaccctgagaacaacgaagctcgtaaacaagctattcgccgtcacctggagttctttaacacccagccgttcgtggctgcgccgattctcggcgtaaccctggcgctggaagaacagcgtgctaatggcgcagagatcgacgacggtgctatcaacggtatcaaagtcggtttgatggggccactggctggtgtaggcgacccgatcttctggggaaccgtacgtccggtatttgcagcactgggtgccggtatcgcgatgagcggcagcctgttaggtccgctgctgttcttcatcctgtttaacctggtgcgtctggcaacccgttactacggcgtagcgtatggttactccaaaggtatcgatatcgttaaagatatgggtggtggcttcctgcaaaaactgacggaaggggcgtctatcctcggcctgtttgtcatgggggcattggttaacaagtggacacatgtcaacatcccgctggttgtctctcgcattactgaccagacgggcaaagaacacgttactactgtccagactattctggaccagttaatgccaggcctggtaccactgctgctgacctttgcttgtatgtggctactgcgcaaaaaagttaacccgctgtggatcatcgttggcttcttcgtcatcggtatcgctggttacgcttgcggcctgctgggactgtaagactgttgtacactaccggggccttttggccccgtttttttatctggaggattaatgacaatcacggacctggtactgattcttttcatcgccgcactcctggccttcgcgatctacgatcagttcatcatgccccgccgtaacggccccaccctgctggcaattcctttgctccggcgtggtcgcatcgatagcgttatcttcgtcggattgattgtcattcttatctataacaacgtcacgaatcatggtgcgttaataacgacatggttattaagcgcactggctctgatgggtttttatatattctggatccgcgttccgaagatcatctttaaacaaaaaggttttttcttcgccaatgtctggattgaatatagccgaatcaaagcgatgaacttgagcgaagatggcgtgttggtgatgcaattagaacagcgtcggctgttaatccgcgttcgaaatatcgacgatctggaaaaaatttataagcttctcgttagtactcaataagttatgaatttagccaaagctatgtttagtgtatttttaataatcagacatagcttaggctatattacctcttcccttatttgttatttattttaacgtttcattgatatataaatccaaatgaaaatcgttatcaataaagcaatgaaataatatattccaacagttgttttatattctcaaaatatgttaaggttgcgccctcatttggggagtagccgatttccagattccggaaatgtacgtgtcaacatactcgttgcaaaacgtggcacgtacggactgaatactttcagtcaggcgagaccatatgcacatcaatcgctatgcctgcatgaacgcgaaaaccatcacggcttgttgttcatgtatgcatgtttgctgggggcgatgatgtgttttatggataccccggtcaggacattgtcatgaatatcactgctactgttcttcttgcgtttggtatgagcatggatgcatttgctgcaagtatcggtaaaggtgccaccctccataaaccgaaattttctgaagcattgcgaaccggccttatttttggtgccgtcgaaaccctgacgccgctgatcggctggggaatgggcatgttagccagccggtttgtccttgaatggaaccactggattgcgtttgtgctgctgatattcctcggcgggcgaatgattattgagggttttcgtggcgcagatgatgaagatgaagagccgcgccgtcgacacggtttctggctactggtaaccaccgcgattgccaccagcctggatgccatggctgtgggtgttggtcttgctttcctgcaggtcaacattatcgcgaccgcattggccattggttgtgcaaccttgattatgagtacattagggatgatggttggtcgctttatcggcagtattattgggaaaaaagcggaaattctcggcgggctggtgctgatcggcatcggcgtccagatcctctggacgcacttccacggttaataagaacgctgccagaggtgaatattaaagtccgtctggcagtcgaacacttcttttgctgccagtgtttgccagacttctggcttcgcacgccaggcaaacggcgtcatctgcaataatgcgacggcttcatcaccgcgaagacgcatcggataacacaactccgcactctgctgtaatgtaaaaccttccagttgttctgcatgaggtgcatgaagatgtacttcattgtaaatcagccccttcagctccatcaaatgtcgcggtcccggcgtggcagtaatgacccagccgccgggcttcactactcgtgctaattcttctgctttacacggcgcgtaaatacgtattatggcgtccatactggtatcggaaaacggcaaacggtggctggaagcgacacaaaaagtgacctgcggatagcgtttcgccgccgcttttatcgctaccttgctaacatccagaccaaacgtggtgatttcgggcaacgcatcggcaaatgcgtgtgtgtaatacccttcaccacagccaatatccagcaccgccgtggccttatcatcaagccgttccctcagttgggcgacaattgcatcacgcagcggctgataatgtccggcatctaagaatgcgcggcgtgcttgcatcatttccgcgctgtcgcccggatcacgagaccgtttatgctgaacgggcagcagattgacatacccttctttcgccatatcaaactgatgtcgctggggacagatatagctgtttttttcacggctaagaggctgatggcaaagtggacaggaaaaagacatgacaactccggcaggatactaaaggccgcaagtgtaacgcgaatcacgcggcgggcaaatatccgaacgccaggagcgaagataaagcatagtaaaaagcctcgcattcgacgaggctttatagcgagattgaagcgtattcacacttcagatcagtggattcgatcagatagctgttacgttaacagctgccggacctttctggccgtcctgaatttcgaactcaacgttctgaccttcagccagagttttgaagccattaccctggatagcggagaagtgtacgaacacatctttgctgccatcagccggagtaatgaagccaaaacctttagactcgttgaaccacttaacctgacctttaatctttgccatttgaaaaattccttagattgttttcttcgcccgcaggcataacatagataaaacactcacattactgcaactggcaccaatataaggctcggcagagaagcggtattcaacgtcaacgtgtttactcaggacttctttactgaaaatgccacacataaacagaactgtacctcgtttaacccgaaatctgttatcacatacaacgttaattatggcaagccatttttaaacatgtctcgatcagacgcacaaatctcgatacgtcttccactttttttgcacacttatgcaacggaatacgcgccgatatatcattgtgcttaaccttgccagttcaggcagatacttaaactggcgtattttctaacatagttcaataagttcagttgttccaggccagtgggagaagttattacatagtgcgtgcaatatcacattttttgctatgcaatgaataaaaagttatatcactttttctcataaaacagtcagttaacggctattaattaccctaaagagaagtcaatccccaaagggattgtaaatttaaaataagaaaaattgatgaatgagcaaaaaaatcaagagagaaacgtttcgctaataaataataccacgcttaatcacaaatccgatgtaaacatcctaataaattaatggggtaaatatctttttctgatatcccgttacgcaaataaataatatgataattatttgaagtcagaccagagttttaatttgaagcagttgcaccatgacagtgcgtataatcaggatgaattgagtaacccttcaacgacggggttactcaagattgaggaaggattatcgttcggcgaccagacgaataatatcttcgtcttcaacgcttttttgactctcaacggtctttttatctgctttctctggttcgtttgcttcgcacaaacgacgtaacagtgcattttgacgtttttgctgatccagcaacgcctcaagcagttcaatctgttcgttagtccgactactggcacgattgataaaaaaccacaagatgagcccgataagaagaaccaccacgcttacaaccaaagacgcaatgttcatcacgccactatttacaacttcgttcatttcaccacctctgagtagaggcgctattctaccactgctggagaggaagaaaatctagtgctgaaaaaatgatatcaccacgggataaactggttaatggcacaaattccgctgaaaaattgtacatcctgatcgcacatcatgttgaatacctgcgcccaaagcagcaagcaagccaacaccacgacaaccagaacgacccatcgaaactttttcactccaatctccgtttcacctaccttatgtcattaaactagcatgcgttagttaaacagcgcctaactatgtcgatattcgtgctttttcggaatgagtcgcttgcttcagcgcatattgccgctacgattaagcgaacataaaaagagaagaggttgtaatgcgattcatcattcgcacagttatgctgatagcactggtatggataggattattactcagcggatatggcgttttgattggaagcaaagagaatgccgcaggattaggtttgcaatgtacctatctgactgccagaggcaccagcacggtacaatacttgcacactaaaagtggttttttggggataacagattgcccgctgttacgcaaaagcaatatcgtggtcgataatggttaagggcaataaataaccagattctcactcctgagtaaaatactcttatagcaagcgcgtttaatataacgccaccttcaactttatttttctcatgctaaataaagaacctgtctgtttgatattccgacaggttcttactctcatcagaacggatagtcgtgataacccatttgggcagaaattttgcgcgctgcggtatgcaacattgcgacatattcctgtaaacgctcttcagagaaacgcaacgtcgggaaggagatgctcaaaccggcaatgaccacgccaaagcgatcaaataccggtaccgcaatgcatcgcagcccttcttcctgctcttcattatcttcgccatacccctgctcgcgcacctggtccagaacgggtaataacgcttctgtactggtgatggtccgctcggtactgcgtttatactccacgccctcaagaatttgcttcacttcatcgcgatcgcgccatgccagcagtaccttaccaatcgcggtgctgtacagcggattacgacgcccaatccgactatacatgcgcaaattgtacatagagtcaattttgtgaatgtaaacaatactgtcttcgtccagtgcgccgaggtggatagtttctttggtcaggcgggagagctcacgcatctggatatctgcgctacgaattaaatcgacgttttgtaacgcgcgagcgcccagttcaaacaatttcagggtcagggaatatttctcgctctccccttcctgcgccacataacctaaggttttcatggtctgtaaaaagcgataaacggtgcttttactcatcatgacgcgctggctcagctcggttatccctatttcgcgctcttcacccagcgcctgcaaaatgccaaaaacttttagcacggaagatacagaatcaggctgtttatccagatctgcgttagccatttatcacctcattgcgagtgttttataaaaatcagaactgttttttattataatttcgcaccagggtggtcgcaatccatcttttgccggttagttacaattctgcgacatccaccgtgaatatcagtgctagaatcatacccctgttgattattcaccaaagatataaaattcctatgccaaaagttcaggccgacggcctgccattgccccagcgatacggtgcgatattaaccattgtgattggtattagcatggccgtccttgacggcgcaatcgccaacgtcgccctgccaacaatcgccacggaccttcatgccacgccagccagttccatctgggtagtgaacgcctatcaaatcgccattgtcatctccctgctcagctttagctttctgggcgatatgtttggctatcgacgtatttataaatgcggtctggtcgtttttctgttgtctagtctgttctgcgccctttctgatagcctgcaaatgctcacccttgcgcgtgtcatacaaggtttcggcggtgcagcgttgatgagcgttaataccgcacttatccgcctgatctatccacaacgttttctgggtagagggatgggcataaacagctttattgttgccgtctcttctgctgccgggccgacaattgctgcagcaatcctctccatcgcatcctggaaatggttatttttaatcaacgtaccgttaggtattatcgccctgcttctggcgatgcgttttctgccacccaatggttctcgcgccagtaaaccccgtttcgacctgcccagcgccgtgatgaacgcgttaaccttcggcctgcttatcactgcgttgagtggtttcgctcaggggcaaagcctgacgttaattgctgcggaactggtggtaatggttgttgttggtattttctttattcgccgccagctttctcttcccgtaccgctgctaccggtggatttactgcgtatcccgctgtttagtctttctatttgcacatctgtttgctctttctgcgcacaaatgctggcaatggtttccctgcccttttacctgcaaaccgtgctcgggcgtagtgaagtcgaaacaggtttacttctgacaccgtggccgttagcaacgatggtgatggctccgctggcaggctatttgattgaacgcgtacatgcaggattgctgggggctttagggttgttcatcatggctgcggggcttttttccctggttctgctgcccgcgagtcctgcggatatcaatattatctggccgatgatcttatgtggtgctggatttggcttattccagagtcccaataaccacaccattattacctccgcgcctcgcgaacgtagcggtggagccagtggcatgttaggaacggctcgtctactgggtcagagtagcggcgcggcgctggtggcgctgatgctaaatcagtttggagataatggtacacacgtcagcctgatggctgcggctattctggcagtgattgctgcctgtgtcagtggtttacgtatcactcagccacgatccagggcataaaaaaagcgcgtcgatcaggacgcgctttttagtatttacttcatattacttcaggtattcacccgtacgcagagcttcaattcgtttatccagcggcgggtgggtcatgaacaactcactgaggcttttgctcttaccgttaatgcagagagccatcatgctggttgcttcttgcggttcatagctggttttcaggcgctgcagcgcggcaatcattttctcgcgaccaaccagttttgcgctaccggcatcagcatggaattcacgatgacggctgaaccacatggtgataatgctcgccagaataccaaacaccagttccagaaccgttgcaaccgcaaagtagatcagcgggttgccgttgctctcttcaccttcatcacgatttccgcccataaaacccgcggcaagctgcgccagaatacgggaaataaagataacgaaggtgttcaccacgccctgaatcagcgtcatggtgaccatatcaccattggcgatgtggctgatttcgtgagcaattaccgcctcggcttcatccgggctcatgttctgcagcaaaccggtgctgacagcaaccagagaggcatcacggcgcgcaccggttgcaaaagcgttgatgtccggcgcatggtagatagccacttgcggcatagcgatccccgcctgacgagcctgggttgctacagtattgaccagccaacgttccctttcgttacgcggttgctcgatcacttccccgccaacagatcgtaatgccatccatttggacatcagaaggctaacgaaggaaccaccaaaaccgaacagcaaggccatgatcatcagcccctgaacgctgctgctctgtatccctgtcaggctcagtaccagcccgaaaacgaccattacggccaggttcgttagcaggaagagcgcgattcgcatcataattttctttttacctcagtttaacaaaacgcaatatgcgatacccacatcgtatgggttacgcgactattttcaagtctggatagtgcgtaagtcaccagaaagacacaactttacattttgtagcatctgatttacggcatcttgtcgctgttaaaaaatcaggcacaatttcttgtgcctgattgatattacttgacgggagcgggttgttccgcgggtctggctttttcaagcttcgccagatcgagtgcgatattcaccgtctcatccagataaggatccggctcctggtaatctttcggtagatcatccagtttcttcaactccggtttaccttcgcgtttaaagcgttcgttcaaacgcgccagacgcgtcgcatcatcttcattattctctttctcacgcacagcgtaattcagagaaacgatattgcgcttgtccttcatagcgttgaagcgcgcgatatccttcatgatgttctggaactcaggatctttcgcgatacgcgcattatgttccttcagcagctccggttcaaaggccgttaaatctccacttttcacataagtcgcggcatcaatgctatcccacggcagcgcgttatcttcgaatttctcacccgtttccgtttcttcattacccgtcggcatgatgatgtctggcgttacgcctttacgttgcgtactgccgccgttaacgcgatagaatttctggatcgtgtactgcacagaacccagcgctggccattcaggacgtaacatctgatcgtaaatacggttcaaactacggtattgctgaacggtgcctttaccaaacgtcggttcacccacaaccagcgcacgaccgtaatcctgcattgccgcggcaaagatttcactagcgctagcactgaagcggtcaaccagcaccaccagcgggcctttatagaaaacctgtccgtcggtatcgctatcttcacgaaccttgccgttgttatcgcggacctgaacaatgggacccgcaggaataaacagaccggagaggcttacggcttcagttaacgccccaccgccattgctacgcaggtcgatgatgacgctgctgacattctgtttttccagtttctgcagttgcactttgacatcgtctgtcaaacccacatagaagcccggaatatccagcacgccgactttctctttaccgacggtcttcacgctcattttaaccgcgcggtcttcgagacgaatacgttcacgggtcaacgttacagtacgggtcttggtccctttaccagcaggtaaaatttccagacgaactttactgcccttcggccctttaattaaggcaaccacatcatcaagacgccagccaatcacgtcaaccatcggcttgcctgtttgaccaacaccgacaattttgtcaccaacgctgatagctttactcttcgctgccggaccacctgccaccatgctattgataacggtgtagtcatcatccatttgcagcactgcgccaataccttccaggctcaaactcatttcagtgttgaactgttcggtattacgcggggaaagatagttggtatgcgggtcgatttcacgcgcaaacgccgtcattgccaggctgaaaacatcttcgctgttggtttgcgccagacgacgaatggcaaatttgtagcggcgagtcagggtttcacgaatttctttatccgtttttcctgtcagcttcaggcttaactcgtcgaatttgactttactgtcccacagcgcgttcaactcagcctcgtttttcggccagggcgctttgctgcggtcaaggttataagtgtcgttgccggtgaaatccatcggcttttccagtacgctcaaagcgtactggtaacgctcaaaacggcgcttttgcgccagattgtagagatcgtagaaaacgtcgagtttgccactacgcagttcatcgcctaactcggttttctttttcgcgaactgttcaacatcgcttgccagcagcacgttgtggctgtaatcgagcagattcaggtagcggtcaaagattttggcgctaaatgcctgatcgaggtcgaactggcgataatgagaacgggtgaagcggctcgttacgcgctcacttaccgtcgcatgctgcgtctcttcctttaataccggaatttgatcagcacgcgtgatatcttctacagcgaaggtctggcctgctattgcaagcaggccagctaacgcggtaagcctaaaaaacatgttcatgcctggcccggcctccgtttcagaacaccaggtgttctgcgcgcacaatcaaagacataccgctattcagctggacgcggacgccgtctttggtgatttctaatacggtggcatccatcgcgttttgacccgctttcaccttcagggcttgtccgacagtcagagcactaatgtcagaaaccggggtgtgctgttcttcgcgaggtgcttttactgtttttggcgctttctctaccggcttttgcgcacgaggtttacgttcagcgccttctttgcggcgtggcgtagtcggacgtggcttgcgttcgcggcgcggtgcgtcttctttctcaccagcagttgcggcagcttcgcgttttttcgcttgctgttcagcacgctgtgcctgaacacgcgctttcgcttcttcaagctgcttgcgagcatgctctacatgttgctcgtccagctcaccgcatgggttgccgtcaagatcgacacgcgttgcgccgggtttaacaccgtaaagataacgccagctgctagtgtagagacgtaaagcggatcgcaattgcgttttgctcaggttcatttccccagcaacacgatcgaccaaatcctgaaaaataccgattttcagcggacgcgcttcaccttccgcactgaaacagtggggaaaacgttcggccagaaacgcgattacttctttactgctattcaacttaggttgattttccatgaaatttcctgattacaacggacgtagccaacaagcgcaggcatgaacaggcgtcattataatgacgctatcagtaaatgctacgttatccgttgattatcctgcgacgctcgcaaagaattttttgtaatccgtcgttgcaagcactttttcaagctgtgccacaagctgacgtaagccttgctcgtcctcgtctgtaaagcgaccgaagacggtactatcgatgtcgagaacaccaataatctgatttttcaccaccagcggcagaacaatttcagaattactcgccgcatcacaggcaatatgcccgtcaaacacatgaacatcctcgatacgctgcacttgattgcgggcaaccgcagtgccgcacacgccgcgcccgacgggtatccggacacaggcaattttgccctgaaatggtccgagtaccagtgtatcgtcctcaagcaaataaaaacctgcccagtttatgtcagtgagacgctcatataacaacgcactggtgttcgcaagcgttgccagaaaactggtttctcccgccatcagcgcgttaaagtcgcgatttaaatccgcgtaaaattctgttttgttcattatataatcacttggttgtcttacctggatctgccagcctattaaaataagcattaaatgcgttaatgctcaagatcattcccatcatgggttaagattaatgttaattcttattacatttggcacgtcatggctcttaacacaccacaaattacgccgacaaaaaagataacagtgagggcaatcggcgaggaactgccgcgtggtgattaccaacgttgcccgcaatgtgacatgctgtttagcctgcccgagataaattctcatcaaagtgcctattgtccgcgctgtcaggcaaaaattcgtgacgggcgcgactggagcctaacgcgcctggcggcaatggccttcaccatgctgttgcttatgccgtttgcctggggcgaaccgctgttgcatatctggctgttaggcattcgtattgacgccaacgttatgcaaggcatctggcaaatgaccaaacagggcgatgcgataacggggagcatggtctttttctgcgttattggtgccccgctcattctggtgacctccatagcttatttatggtttggtaaccgactgggaatgaatttacgtccggtactgctgatgcttgagcgacttaaagagtgggtaatgctcgatatctacctggtcggcattggcgttgcttctataaaggtacaggattatgcccatatccaggctggtgtcggcttgttctcttttgtggcgttggtgattttaacgacggtgacgttgagtcatcttaatgtcgaagaactgtgggagcgattttatccgcagcgccccgctacgcgtagggacgagaaacttcgtgtctgtcttgggtgccattttaccggctatccagatcagcgtggtcgctgcccgcgttgccatatcccgctacgcctgcgtcgccgtcatagtctgcaaaaatgctgggcggcgctgttagcgagtatcgttttattgttacctgccaacctgttgcctatttctatcatttatctgaacggaggacggcaggaagatacaattctttccggaattatgagcctggcaagtagcaacattgcggttgcaggaatcgtgtttatcgccagtattctggtaccgtttactaaagtgatcgtcatgttcactttactgttgagcattcattttaaatgccagcaaggtttacgcacacgcattctgttactgcggatggtgacctggattggtcgctggagcatgctcgacctgtttgtcatatctttaaccatgagcctgattaatcgcgatcagatcctcgcttttactatgggaccggctgcgttttatttcggcgcagcggtaattttgactattcttgctgtggaatggctggacagccgcttactttgggatgcacatgagagtggaaacgcccgcttcgacgactgaataaccgcttactttgggatgcacatgagtcaggaaacgcccgctagcacgactgaagcgcagattaaaaataaacgccgtatcagtcctttctggctgctgccgttcatcgcgctaatgattgccagttggctgatttgggacagttatcaggaccggggtaataccgtcaccatcgactttatgagcgcggatggtattgttccaggccgtacgcctgttcgttatcagggcgttgaagtcggaacagtgcaggatatcagcctcagcgacgatcttcgtaagattgaagtcaaggtcagcatcaagtccgatatgaaagatgcgctgcgcgaagagactcagttctggctggtgacgccaaaagcaagcttggcaggtgtctccgggctggacgccctcgtcggtgggaactatatcggcatgatgccgggtaaaggtaaagagcaggatcactttgtcgcactcgatacccaaccgaaatatcggctggacaatggcgatctgatgatccacctgcaagcccccgatctcggtagcctgaacagcggtagtttggtctatttccgcaagatcccggtgggaaaagtctacgactatgccatcaatcccaacaagcaaggcgtggtgattgatgtcctgatcgagcggcgttttaccgatctggtgaaaaaaggtagccgtttctggaacgtttccggcgttgatgccaacgtcagtatcagtggcgcgaaggtgaaactggaaagcctggcggcactggttaacggtgcgattgccttcgatagtccagaagagagcaaacctgccgaggcggaagatacctttggtctgtatgaagatctggcccacagccagcgtggcgtaataataaaactggaactgccgagtggggccggattaaccgccgacagcacgccgttaatgtatcaggggctggaagtcggacagctgactaaactggatttaaatcctggtggtaaagtcacaggggaaatgaccgttgatcccagcgtcgttaccctgcttcgtgaaaatacccgcatcgaattacgcaacccgaaattatcccttagcgatgctaatctcagcgccctgctgaccggcaaaaccttcgagctggtgcccggcgatggcgagccacgcaaagagttcgttgttgtgccaggcgaaaaagcactgctgcatgaacctgatgttctgacgctgaccctgaccgcgccggaaagttacggtattgatgcgggtcagccgctcattcttcacggcgtgcaggtaggccaggttatcgatcgtaaactcaccagcaaaggcgtcacctttaccgtcgccatcgagcctcagcatcgcgaactggtaaaaggcgatagcaaatttgtcgtcaacagccgtgtcgatgtgaaggtggggctggatggcgttgagtttctcggtgccagcgccagtgaatggatcaatggcgggatacgtattctgccgggcgataaaggtgagatgaaagccagctatccactgtatgccaatttggaaaaagcgctggagaacagccttagcgatttacccaccacaaccgtgagtttgagtgcagagacgctgccggatgtgcaggcaggaagcgtagtgctgtaccgtaaatttgaagttggtgaagtgattaccgtgcgtccgcgagctaacgcgtttgatatcgatctgcatattaagccggagtatcgcaaccttctgaccagcaatagcgtgttctgggcagaaggcggggcgaaagttcagctgaatggtagtggtctgaccgtacaggcatccccgctctccagagcattaaagggagccattagcttcgacaacctcagcggtgccagcgccagtcagcgtaaaggcgataagcgtattctgtatgcttccgaaacagcggcccgtgcggttggcgggcagattacgcttcacgctttcgatgccggaaaactggcggtcgggatgccaattcgctatctcggtattgatatcgggcaaatccagacgctggatctgattaccgcacgcaatgaagtacaggcaaaggcggtactttacccggaatatgtccagacctttgctcgcggtggtacgcgcttcagtgtggtcacaccgcaaattagcgcagctggcgttgagcatcttgatactatcctccagccgtatatcaacgtcgaaccaggccggggcaatcctcgccgcgactttgaattacaagaggccaccattactgatagccgttacctggatggcttaagcattattgttgaagcgccggaagccggtagcttaggcatcggtacgcctgtgctgttccgtggtctggaagtcggtacggttacaggaatgacgctggggacattgagtgatcgcgtgatgattgcgatgcgcatcagtaaacgctatcaacacctggtgcgtaacaattccgtcttctggttggcaagcggttacagtctggactttggtctgacgggcggcgtagtgaaaaccggcacctttaaccagtttatccgtggcggcatcgccttcgccacgcctccgggtacgccactggcaccgaaagcccaggaaggcaaacacttcctgttgcaggaaagtgaaccgaaagagtggcgtgaatggggaactgcgcttcccaaataatgcccactgctccggcgtgcctgcgccggagcgtttatgctaaactgcgcgcctgtttttttgccagtggtacatgctcgtggcccaacacaccgtttatttcccggacgcctttctgacacaaatgcgcgaagcgatgcctagcacgctcagttttgatgattttcttgccgcctgtcagcgcccgttgcgccgcagcattcgcgttaatacgctgaaaatctccgttgctgatttcctgcaattaaccgctccttatggctggacgcttacgccaattccgtggtgtgaagaaggtttctggattgaacgcgacaatgaagatgcattgccattgggtagtaccgccgagcatttaagtggcctgttttatattcaggaagccagtagtatgttgcctgttgccgccttgtttgctgacggtaatgcaccacagcgggtgatggatgtcgctgccgcgcctggctccaaaacgacgcaaatttccgcgcggatgaataacgaaggggcaatccttgccaatgagttttccgccagtcgggtaaaagtgttacatgccaatatcagccgctgtggtatcagtaatgttgcgctcacacattttgatggccgcgtgtttggtgcggcagtgccagaaatgttcgatgccattttgctggacgctccctgctctggcgaaggcgtggtgcgtaaagatcccgatgcgctaaaaaactggagtccagaaagcaatcaggaaatcgcagctacacaacgggagcttatcgacagcgcctttcatgcattacgtcctggtggtacgctggtttacagcacctgtaccttaaaccaggaagaaaacgaagccgtttgcctgtggctgaaagagacttaccccgacgcagtagagtttttaccacttggcgatctcttccctggtgcaaacaaagcgctgaccgaagaaggctttttgcatgttttcccacaaatttacgactgcgaaggcttcttcgttgctcgtctgcgtaaaactcaggcgattcccgccttacccgcccccaaatacaaagtcggtaattttccgttcagcccggtgaaagatcgcgaagctggacaaattcgtcaggcggctacaggtgttggcttaaactgggatgaaaacctgcgcctctggcagcgtgacaaagaactgtggttgttcccggtgggcattgaagccctgatcggtaaagtccgattttctcggttggggattaaacttgccgagacgcacaacaaaggttatcgctggcagcatgaagcggttattgctcttgccagtcccgataatatgaatgcattcgagctgacaccgcaggaagcggaggagtggtatcgcgggcgcgatgtttacccgcaagccgcgccagtggcggatgatgtattggttactttccagcatcaaccgattggtttagccaaacggattggtagccgattgaaaaacagctatccgcgtgaactggtgcgcgatgggaaactttttaccggtaacgcctgacagcgcacaaaaaaagcgcactttttgactggcacattcggctgcctcaactaggctgaaaaatggtgcgatcggactggtcgtaccacaatcggcagctaaatggagagcacgaagatgaaaaccagtgtgcgcataggcgcttttgaaatcgacgacggcgaattacacggtgaaagcccaggtgatcgaacgttaaccattccttgtaaatctgaccccgatttatgtatgcaactggatgcctgggatgctgaaaccagtatccctgccctgctaaatggcgaacactctgtcctttaccgtacccgttacgatcaacaatctgatgcctggattatgcgtcttgcctgatccaaaaagaacccgtcggcatggcgggttatttgtcctggttattcccccgttgtaaaatctctcctaaacttaacggtacggcaccacacttcggggatgaaatgttcgcgctggtactttttgtttgctacctggatggcggttgtgaagatattgttgtggatgtctacaacacggaacagcagtgtctttattctatgagcgatcaacggatccgccagggcggttgttttccgattgaggattttatagatggtttctggcgacctgcacaggagtacggtgatttttaattattgcaattgcacaagagtcagttcgcccccaaagacagcaccggtatcaatataatgcaggttgccaatatccacgcgatgtcgcaacggtgtatgaccaaaccagaaatgatcagcacctgtaattccctgccctttttggcgttcacctaatcggctgcggctccacaagacctgatgcaaatcaacgtccttttgccattcataaacatcatctggataatcggcatgagcaataacatgcttgccggtgcgactgtgtacttcaagaataaagggcaaatgctgacatttttccagcgccgttttcgcttgtttctgttgattatctgccagcgcaataaaccagtcgccgccattcatcaaccacaaagacatctgctgggatgccagcgcatccatcgccatctgttcatgattgcctcttaccgcacaaacccaatgttgttccagtaactgcagacaacgtaaactttgcggcccacgatcgataacgtctcccacactgataagtaaatctcgccacggatcaaaacgacaatgccataatttgcggcgcaactgctcaagacaaccgtgtatatcgccagaaagccagatatgtcgccattgatgacccgcaattctctgataaacgggcgcaggctgtttcatcaatattttcctcccgcgctaaagatcacataatcttaacaagaatgttaaaaaacgctggactcagacagtagagtgtgtgttatggttgactataaagtcagcgaaggaaatgcttctggcttttaacagataaaaagagaccgaacacgattcctgtattcggtccagggaaatggctcttgggagagagccgtgcgctaaaagttggcattaatgcaggcttagttgccttgccctttaagaatagatgacgacgccaggttttccagtttgcgtgcaaaatggtcaataaaaagcgtggtggtcatcagctgaaatgttaaaaaccgcccgttctggtgaaagaactgaggcggtttttttattggaaatcaaaaggctattttaggtaattaacagagtttttcagctcgttctataaacggtgccagactcattttttcgccgggattgttaggatcatcaatctgaatcacgctaatgggttgggcattggtcttcccactggcaacttccttttgtgcgatatcgtttaaaggatactgcacgagggtactcggattaataacatacaaagcattacccggtcggcaagtcagcatcacctcttcgcgattaaacgcccatttgtctttacccacttcaaaacgactgacggtaatcacctgcggtgcagccagcgccgctgcagaactggtgagtaacagaaacgccagaatactttttttcatcattttcgtaatccatcaaaaaggttcgagagtcgcaagcaggctgatgatcaccagcactaccgcacctatcgcccattcgagtttagtcatccacacaaaccagggtgccgcacgatcttcatcctgcctcatgcgcggtacaagaacataacgattagccagcgcaatgaccaccataatcatcaccaggatggctttgagcaataagagttggccccagtaagtcgtaagcgtggggggaaatccggtaatcaacaatgcattaagcacgccgcttgccagtacgccgatcaccgcaaaatgcccgcaccaggaaaaacgcatcagcgcctgaatagcctggtgtcgccaacggcctttgatgagttgcatacaccagagcaccggcagtaatcccccaaaccacgccgccgcacaaatcaggtgaatcgcgtgattagtctgatggattttcgctgttaccccttcattcagcgtcgcatgccccactcccgccagcagaataaattgcgcggtagtgagcataaacagcaaacgtggcatattccgcggttgcataagggcgacgatcaacgttacgagggcgagaacaatttgccataaccagatgccaccaaactgcgtttgcaaaacagcctgccaaatgtttgggctaaatacatctgtccatcccgttcccatcaacccgccctgaacggcgagcattgcagtggcactgatcaaactccagacggcagcgtgctgttgtaaacgcagaaaacgcttcgccagcaagcgacgaatcgtcaagggggccagccaggcaccgtacattgcgaagccaaaaaccagcatcaggctggtgaaatggataaatcgcagcgcgatccaggtaaacgccagcatgatttatttcacgctaaaggtgtagtgtcctttcgttttatgcccgtccacgctaacaacatgccagtcaacggtgtaggttccgggtttcaggctatcggccagtggaacaatcagttgcttttggtcctgctcatttcgcttcgccggtaatgttttaatattttcgttttttggccccgtgatttttgcaccactgaatcctgtttcaacaccttcgctgaagtttaaagtgattgcctgcggtgcagctgtcacttgcgcgtttgccgcaggatactgatgcgttaaatgcgcatgtgcccagacggaaggtgtcaccaagctagtggtcaggattgccagcgcgtagcgaagggagcgtgcagtactagccatattatctattcctttttgtaataacttttttacagagcataaccttgtctaatgtctgagtcgaggatcatcaattccggcttgccatcctggctcactcttagtaacttttgcccgcgaatgatgaggagattaagaatgctgaagaatctggctaaactggatcaaacagaaatggataaagtgaatgtcgatttggcggcggccggggtggcatttaaagaacgctacaatatgccggtgatcgctgaagcggttgaacgtgaacagcctgaacatttgcgcagctggtttcgcgagcggcttattgcccaccgtttggctagcgtcaatctgagtcgtttaccttacgagcccaaacttaaataaaacttatacagagttacactttcttacataacgcctgctaaattatgagtattttctaaaccgcactcataatttgcagtcattttgaaaaggaagtcattatgagcttctggaaagttgcagcagcgcaatatgagcctcgtaaaaccagtctcaccgaacaggtagctcatcatctggagtttgtgagggccgccgccaggcaacaatgtcagctgttagtttttccaagcctttctttactggggtgtgattatagccgacgtgcccttcctgccccacccgatctcagtctgttagacccgctttgttatgccgcaacgacctggcgaatgaccatcattgccggccttcccgttgaatataacgatcgctttattcgtggaattgcggtgttcgcaccgtggcgaaaaacgcctgggatctaccatcagagtcatggtgcatgtctgggccgtcgttccagaaccatcacggtggtcgatgaacaaccgcaaggtatggatatggacccgacctgtagtctgtttactacagggcaatgtctgggagaacccgacctgctggcgagcgcccgtcgcttacaattttttagtcatcagtacagcattgccgtgctgatggcaaatgcccgtggtaacagtgcactatgggatgaatatggtcgtctcatcgttcgcgccgatcgtggtagtttattgttagtcggtcagcgtagtagtcagggttggcaaggcgatatcattccattacgctaagctttttcggcctggagcatgccatgttgcgcattatcgatacagaaacctgcggtttgcagggagggatcgttgagattgcctctgttgatgtcattgacggaaaaatcgtcaaccccatgagccacctggtgcgccccgatcgtcctattagtccacaagcgatggcgattcatcgcatcaccgaagccatggtcgccgataaaccgtggattgaagatgtgatcccacactattacggtagtgaatggtatgtcgcgcataacgccagctttgaccgccgcgtactgcctgagatgcccggtgagtggatttgcactatgaaactggcccgtcgtttgtggcctgggatcaagtacagcaatatggcgttatataaaacacgcaagctcaatgtacagacgccgccgggcctgcatcatcaccgcgcgttgtatgactgttatatcaccgccgcgttgcttatcgatattatgaacacctccggctggacggcagaacagatggccgatatcaccggacgtccgagcttgatgacgaccttcacctttggcaaataccgtggcaaagcggtttccgacgttgccgaacgcgatccgggctatctgcgctggttatttaataacctggacagcatgagcccggagctgcgtttaacactgaaacattatctggaaaatacttaatccgcaggcgtagcgggtaatgttccctgcgccagcgcgaccagaaaagcatattccatcgctacgccttcgtagcttttaaagcgaccagatttaccgccatggccactgtccatgtcggtacagagcaataaaagatggtcatcggttttcagctcgcgcaatttagcgacccattttgccggttcccaatattgcacctgagaatcgtgcaaaccggtcgttaccagtaaatgcggataagcctgtgcggtgacgttgtcatacgggctgtagcttttcatgtactcgtaatattgcggatcctgcgggttaccccactcttcaaactcaccagtggtaagaggaatactttcatcaagcatcgttgttacaacatcaacaaacggtacctgggcgataacgccgtggaataattccgggcgttgattaattgcaacgcccatcaacatgccccccgcactcccgcccatcgcataacaaaggctaggagagccatagcccagttttaacaatgcatcgcaggcatcaagataatcattaaacgtatttttcttcttcagaaattttccgtcttcgtaccattgttgccccagctcaccaccgccgcgaacatggacaatggcgtagacaaagccacgatctaacaaactcaagcggctaaaactgaaatcggcatcaatacttgcgccgtaagaaccatagccatacaccagcaacgggttgtgtcctttgcgaaaatgtttgcgatggtagaccaagctaaccggaacttcgacgccatcacgggcgactatccacaggtgttcactgcggtaattcgccgcataaaaaccaggaacttccgtttgttttaatacacgacgctcaccggtatccatatccagttcaaacaaagtgtctggtgtagtcatggaagaataaccataacgcaatcgcgcggtttcaggttctggattgtaggcaatccaggtcacataggccggatcatcaaaggcaataccaatgacttcccgggtcttgcggttaatttggcgcaaactggttaacccgcgctgacgctcttcaaccaccagccagtcggtaaacagcgtaaacccttccagcatgatgttttcgcgtggcggaattaactcttcccactgttgctcatcacgcatacgggtacggtataagccaaagtttttgccgtggcggttggaacgcagataaaaacgatgctggtagtgatcaaggctgtattcgtgatctttgcggcgcggcagaaaaacaaacggctcggcatcggccatttccgcgtccagcaggcgaacttcactggtggtggcgctggccaaatgaatgactacatagtgcttgctggtcgttttatgcaggctgacgtaataggtatcgtctttttcttcgtagatcagtttatcttggcttgctggcgtaccgatggcgtgacgccagacctgataaggcagcagcgtcaccggatgcttgcgaacatagtagaaaatccaggagtcatttgcccagacaaagctgggttcaacgttatccagcagttccgggtaccagttaccagtttccagattacgaaaacgaatgccgtactggcgtcgggaaagaaaatcttctgccagcgccataatggtgttatcgggcgtaatcgccattccgcccatgctataaaactcactatgagctgcgcgcttattggcatcgagcaatgtttcccactcatcccactcttcactgaatgcgctttgacgctggtagatagcatattcacagcctggttcataaatatgccgatagcggtagccatttttgatgtagggcgcagaaacttctcgttgcggaatgcggtcgatgatttcctttaagatgcgatcctgcaaggcttgttgactggccatcacccgatgaccgtaactattttcttgttgcaggtagtccaggacttctggctgagaacgcgtatcgtcccgcagccagtagtaattatcgatgcgcgtatcgccatgaagcgtcatggcgtggggaatgcgggcggcttttggtagcatgttattgttctttctggttgaaacatcttataagggtggcaaaactcaccggggatgcaagcgaaacaggggagtcattgcttagatgatgacaggtaatggcgcggatatcgaatgttatgcagacagagaaaatcagcctgttcaaatggctgtgcgattctggatagcccgaaatagtcaacttcaggctatccagagagcggaattattccgccaaagtgcgtttttgctgttcgagatcgcgttcaatgccgtcacgaacatcctgggggattttcagcgcgtcacccagtgcattcaggtaactgcgttccataaaatggtcaatatcaatagccgcgcaactcaggaaatagatttccagcgcctcttcttcattgcggaccccggtagccaggcgttgtggatccagcggttgttcgattgcctgctcaatgagtacacgcccctgctcttccacgccggctccacgcaattgctggtcgattgccgcacgttctttggcatcaatatgaccatcacttttagcggcaaagaccagcgcaaggatcaaacgtgctgtacgctcatccagcggcgtactttgcgcgccaaactgcggttcgtcctgatgcgccgcgcgaattttatctttgtatttattccacagcaccgtacccgctaccgctccgccgccaaccagtaacgcgttggtgccatatttcgtaagaagtttacgtgcacttttatttgcgaccagcagcccagccagtccgcctaatgcgcctggcactaacagtttgaccaatccctgatccgcagagctggaggtagaagaactgctttgcccaagcagggattgcagttgatttaaccagttagccatatttgctcctcaataaccatttttagtgcctgtagcatagcggatgaggatgtcagaaaatgtatatcgagacaaaagatgcgcaaataagcggggcggtaggccgttattcaaagaaattcgcgccaggtaaggtatttactgtatatcaggtgataagggtattttaggtgaaagtagtttgtcgttttgagtggcattgtttgatgctgattgcccgatgcgacgctgttgcgtcttctcaggcctacgattgtggtgcgttctggggcggacaaggcactcgcgccgcatccgccaacagtcaatcgaattatcagaagccattaacgccgctgatattccgccattcccgctttgcagtccacgctgacctggtaatgaatatcggcacttttaccacgcacggttagcggtacactccatttatcatctttaccctgaatgtcctgcaaactgacccaagccacgggatcggcctgaccgacaattttttgatcatctgcccaacgcgccacgcgattttgttgataatcacgttttacgctcgcggcaattccggcagcatccagatcttcacactttgggaaagtgacgctcttgctggtttcattattggcagcgaaaacacttgcgcaggcagaaaccaacaacagccctaaaaacgcccctctttttttcatgtttttctccatagcacaatgattcaggagaaagcatggtacaaattgtcaggagcgcaagttgcttcaggccgcgtgactggcatcttcctcttcggattcagcaccgacgacctgtggggacggtaatttgccggttttcagaatggtgctcagcacatctttttgttctgccagccataggctaagggcttcacgttgctcgtcttccatttgcactggagaatttgtcagccaggtgtcaagcagatccgccgtatcaagcattttgtcataagcatcggcttcctttttgctggtaaagctcattttctcttcgccctcacgaatgactacgtatttaacttcaaccgccatttgcagcctctcataataactgtgattttatacagtatatttcttttcggttgagaaatcaacatcagcaataaagacacacgcaaacgttttcgtttatactgcgcgcggaattaatcaggggatattcgttatgacgttattaggcactgcgctgcgtccggcagcaactcgcgtgatgttattaggctccggtgaactgggtaaagaagtggcaatcgagtgtcagcgtctcggcgtagaggtgattgccgtcgatcgctatgccgacgcaccagccatgcatgtcgcgcatcgctcccatgtcattaatatgcttgatggtgatgcattacgccgtgtggttgaactggaaaaaccacattatatcgtgccggagatcgaagctattgccaccgatatgctgatccaacttgaagaggaaggactgaatgttgtcccctgcgctcgcgcaacgaaattaacgatgaatcgcgagggtatccgtcgcctggcggcagaagagctgcagctgcccacttccacttatcgttttgccgatagcgaaagccttttccgcgaggcggttgctgacattggctatccctgcattgtaaaaccggtgatgagctcttccggcaaggggcagacgtttattcgttctgcagagcaacttgctcaggcatggaagtacgctcagcaaggcggtcgcgccggagcgggccgcgtaattgttgaaggcgtcgttaagtttgacttcgaaattaccctgctaaccgtcagcgcggtggatggcgtccatttctgtgcaccagtaggtcatcgccaggaagatggcgactaccgtgaatcctggcaaccacagcaaatgagcccgcttgcccttgaacgtgcgcaggagattgcccgtaaagtggtgctggcactgggcggttatgggttgtttggtgtcgagctatttgtctgtggtgatgaggtgattttcagtgaggtctcccctcgtccacatgataccgggatggtgacgttaatttctcaagatctcagtgagtttgccctgcatgtacgtgccttcctcggacttccggttggcgggatccgtcagtatggtcctgcagcttctgccgttattctgccacaactgaccagtcagaatgtcacgtttgataatgtgcagaatgccgtaggcgcagatttgcagattcgtttatttggtaagccggaaattgatggcagccgtcgtctgggggtggcactggctactgcagagagtgttgttgacgccattgaacgcgcgaagcacgccgccggacaggtaaaagtacagggttaaacccggcaaaaaaacgctacaaaaatgcccgatcctcgatcgggcattttgacttttacagcttagcgccttctacagcttcacgcgccagcttagtaatgcggtcgtaatcgcccgcttccagcgcatctgccggaaccagccaggaaccaccgatgcacagcacgcttttcagcgccaggtagtcacggtagttagccggagaaataccacccgtcgggcagaaacggacctgggagaacggacccgcgatcgcctgcagggctttcacgccgccgttagcttcagccgggaagaatttgaactctttcaaaccgtagtccatacccagcatcagttcggaaacagtgctgatccccggaatcagaggaatagtcccttcggtagcagctttcagcagcggctcggtcagacccgggctaattgcgaactgtgcacccgcttcagtgacttctgccagctgctgtggattcagcaccgtaccggcacccacaatcgcttcaggcacttctttggcgatagcacggatagcgtcaactgcacactcggtacgcagagtcacttccagaacgcgcaccccaccagcaaccaacgcttttgccatcggcaccgcgtgttccagtttttttaccacgataaccggtacaaccgggccggtggtcaggatactttctgcacttgttttccagtttttcatcagagttttctctcgcctgattacaaatttgtcgtcttaaaaagtgatacaggttgcgccctgttcggcaccggacagtttttcacgcaaggcgctgaataattcacgtcctgttcccacgcgactcgcgctcaggtcaggaatgtgcggttcgcgagcagccagttccgcttcgtctaccagcagcgtcagttcgcctgtctgtccattcacacgaatgatgtccccgtcgcgcacttttgccagcagcccgccatcgtaggcttctggtgttacgtggatagcactcggcactttaccactagcgccggagagtcgtccatcggtaactaacgcaattttgaaacaccggtccaataatacaccaagtggcggcatgagtttatgtaattctggcattccgttcgcttttggcccctgatgacggacaacaacgacacaatcgcggtccagcaaacccgcttcaaaggccggcataacgtcatgctggctttcaaaaacaaccgctggcgcttcaatcacctggttctcaaccggcacggcagaggttttcataaccgcacggcccaggttaccgcttaacacttttgtcccaccatgatgagagaaaggttgttcgaaggaagcgatcacattgctgtcgagacttttttccgccccttcccgccagtccagttcaccattattcagccatggttcaagggtataacgagacagaccaaaacctgccaccgtattgacatcttcatgcagcaggcctgctttgagcagttcacgcaccagaaccggtacgccacctgccgcctggaagtggttaatatcggccggaccgttcgggtagagacgtgccatcagcggtacaacatcagaaaggtcagagaagtcatcccagttaatctgaataccggccgcgcgcgccatcgccaccaggtgcatggtgtggttagtggaaccaccggtcgccagcagtgcaacgataccgttcaccaccactttctcatcgatcatcttaccgatcggcatccattcattaccattaccggtcatgcgtgtaacctgacgcgcagctgcggcggtcaaagcatcgcgcagcggagaatccggatgaacaaaagaagagcctggcaactgcatccccataaactccaccaccatctggttggtgttggcagtaccgtagaaagtacatgttcccggcgcatggtaagacgcggcttcactctccagtaaggccatgcggtccactttaccttcggcataaagctggcgaatacgcactttttctttatttggcaaaccgcttgccatcggtccagacggcacaaacaccgcaggcaaatgaccaaagctcagggctgccatcgtcagacccgggacaatcttgtcgcacacaccgaggaacagagcaccatcaaacatgttatgggacagccccaccgccgcagacatcgctatcacttcgcggcttagcaggctcaattccattccatcctgcccctgggtgacaccatcacacatcgccggaacaccgcccgcaacctgaccaaccgcattcgcttcatgcagggctttacgaatgatttctggatagtgttcataaggctggtgcgcggagagcatgtcgttataggaggtgatgatggcgatattgttacgcaacatgcttttcaaagaggctttgtcttctggctggcaggcagcgaaaccgtgtgccaggttaccgcatgccaactggctacgatgaacggtgctagttttcgcttgttctatccgggcgagataagcagagcgagtctcgcggctacgttcaatgattcgatttgttacgcgtaacaattgtggattcataaaggctcctgaaattgagttgtcagagcaggatgattcacaacgcgtttcattcagaggatttatgactgaaacgcctgtaaccggagctcatagggcaaaaacgtttcagtcagtgtaataaaaaaagcctcgtgggtgaatccgcacgaggcctgaaagtgtaaaaattgttctacaatctgcgcaagatcatgttaccggtaaaataaccataaaggataagcgcagatattactcaaactcattccaggaacgaccatcacgggtaatcatcgccacgctggcaacgggtccccaggttccggcctgatacggtttcggcgcatcattgtccatcgcccacgcctcagtaatggagtctacccatttccaggcttcttccacttcgtcgcgacgtacaaacagtgcctgaataccacgcatggtttccagcagcaaacgttcataggcatccgccagatgcgtctgattaaaggtttcactatagctcagatccagcttggtgatttgcaggttatgtttgtggtcaaggccaggaactttattcagtacctggatatccacgccttcatcaggttgcagacggatagtcagtttattctgcggcagatcctgccagctttctttaaacagattcagttcaggtgttttgaaatagaccacgacttcagaacatttggtcggcagacgtttaccagtacgcaggtagaatggcacaccggcccagcgccagttatcaatgtcgacgcggatcgccacgaaagtttctgtattgctgctcttgttcgcgccctcttcttccagatatcccggcacttttttgccctgggcgaagcccgcagtatattgcccgcgtacggttttttcgcgtacgttggagcggtcgatgcggcgcagagacttcagtactttcactttttcatcgcggatgctgtctgcgctcaggtcagacggcggagacatcgcaatcatgcaaagaatttgcagcaggtggttctggatcatgtcgcgcatctgaccggctttatcaaaatagccccagcgcccttcgatccccacttcttctgccacggtaatctcaacatgatcaatggtgcgattgtcccagttattcacaaacagggagttagcaaaacgcagcgccaacaggttcagcaccgtttctttaccaagatagtggtcgatacggtaaacctggcactcctcgaagtattcgccaacctgatcattgatttcctggctggtcgccaggctcgtccccagcggtttctccatgactacgcgtgccggtttagcattcagttttgcctcgccaagccctttgcaaattgcgccaaaagtgctgggcggcatggcaaagtagttaatggtgatacgatttttttgatccagcatcgcgccgagacggctgaatgcagcagtgtcattgacatcgagattacaaaaatccagacgtgcactcagggtgtcccataaaccttcatcaatggtttctttcatgaaagtttcgagcgcctcgcggacaactttggtatatgccgctttatcccagtcagcacgccctacgccgataatccgggtgtccgggttgagctgaccggctttttccagttgatacagggaaggcagcaatttacgacgcgcaaggtcgcctttcgcgccgaaaatgaccaggtcacaggcctgggctgtttgcgttaccgccatgtcattctccttaagttaactaacccggtacttaagccagggtatacttgtaattttcttacggtgcactgtactgcttttacgagcttgcgaaaactgtaaacgcttatccacccgtgcgattacgggaaaagcgcgcaaagtgcggcaaaactgataaaaaaatcatcgttttccattgggtaaaaatctgacactgatcatgttatgaaaaaaaataacaacttttttatctgcttttgtcattaacacggcacacaggcgtaatatctgacaaaactgcatttcgatttctttcagtgcggaaatcgtcattacccgtgagtctctttacatcatgaatatgctggaaaaaatccagtctcagctggaacatttgagcaaaagtgagcgcaaagttgccgaggtcattctggctagccccgataacgcgatccatagcagtattgctgctatggcactggaagccaatgttagcgaaccgacggtgaatcgtttctgtcgcagcatggacacgcgcggttttcctgattttaaacttcatctggcacagagtctggcgaatggcactccctatgttaatcgcaatgtcaatgaagatgacagcgttgaaagttacacagggaaaatatttgagtccgcaatggcaacgcttgatcatgtccgtcatagtctggataaatctgccatcaaccgcgccgtcgacttgctcactcaggcaaaaaaaatcgcctttttcggattaggctctagtgccgccgttgcccacgatgcgatgaataagttctttcgttttaatgttccggtggtgtactccgatgatatcgtgctgcaacgcatgagttgtatgaattgtagcgacggagacgtggtggtgctgatttctcacactggaagaacaaaaaatctggtcgagctggcgcagctggcacgcgaaaacgacgccatggtgattgccctcacctctgcgggtaccccgctcgcccgggaagcaacgctggcaattaccctcgacgtaccggaagatactgacatttatatgcccatggtttctcgacttgcacagctgaccgtgatagatgtgctggcgacaggatttactttgcgacgcggtgcaaaattcagagataacttgaagcgggtcaaagaagcgctgaaggaaagccgttttgataagcagttacttaatttaagtgacgatcgctaaaaacgactgtcactgtcctaatcttatacgacatccgaatgagattaatttatcgccatcgcggcgttatttcattcggatttcatgttcaagcaacacctggttgtttcagtcaacggagtattacatgtccagaaggcttcgcagaacaaaaatcgttaccacgttaggcccagcaacagatcgcgataataatcttgaaaaagttatcgcggcgggtgccaacgttgtacgtatgaacttttctcacggcagccctgaagatcacaaaatgcgcgcggataaagttcgtgagattgccgcaaaactggggcgtcatgtggctattctgggtgacctccaggggcccaaaatccgtgtatccacctttaaagaaggcaaagttttcctcaatattggggataaattcctgctcgacgccaacctgggtaaaggtgaaggcgacaaagaaaaagtcggtatcgactacaaaggcctgcctgctgacgtcgtgcctggtgacatcctgctgctggacgatggtcgcgtccagttaaaagtactggaagttcagggcatgaaagtgttcaccgaagtcaccgtcggtggtcccctctccaacaataaaggtatcaacaaacttggcggcggtttgagcgctgaagcgctgaccgaaaaagacaaagcagacattaagactgcggcgttgattggcgtagattacctggctgtctccttcccacgctgtggcgaagatctgaactatgcccgtcgcctggcacgcgatgcaggatgtgatgcgaaaattgttgccaaggttgaacgtgcggaagccgtttgcagccaggatgcaatggatgacatcatcctcgcctctgacgtggtaatggttgcacgtggcgacctcggtgtggaaattggcgacccggaactggtcggcattcagaaagcgttgatccgtcgtgcgcgtcagctaaaccgagcggtaatcacggcgacccagatgatggagagtatgattactaacccgatgccgacgcgtgcagaagtcatggacgtagcaaacgccgttctggatggtactgacgctgtgatgctgtctgcagaaactgccgctgggcagtatccgagtgaaaccgttgcagccatggcgcgcgtttgcctgggtgcggaaaaaatcccgagcatcaacgtttctaaacaccgtctggacgttcagttcgacaatgtggaagaagctattgccatgagtgcaatgtacgcagctaaccacctgaaaggcgttacggcgatcatcaccatgaccgaaagcggtcgtaccgcgctgatgacctcccgtatcagctctggtctgccaattttcgccatgagccgccatgaacgtacgctgaacctgactgctctctatcgtggcgttacgccggtgcactttgatagcgctaatgacggcgtagcagctgccagcgaagcggttaatctgctgcgcgataaaggttacttgatgtctggtgacctggtgattgtcacccagggcgacgtgatgagtaccgtgggttctactaataccacgcgtattttaacggtagagtaagtacgttgccggatgcggcgaaaacgccacatccggcctacagttcaatgatagttcaacagatttcgaatattctgaagcaaacttgaacttatcatcaggcgaaggcctctcctcgcgagaggcttttttatttgatgggataaagatctttgcgcttatacggctggatttcgcccggtttgcgagttttcagcaattttagtatccaggtgtattgttctggtcgcggaccaacaaaaatctcgacttcttcattcatccgccgcgcaatcgtatgatcatccgcctctaacagatcatccatcggtgggcgcacctgaatcgtcagacgatgcgtcttgccatcataaatcggaaacagcggtacaacgcgcgcacggcacactttcatcaaacgaccaatcgcgggcaacgtcgctttataggtggcaaagaaatccacaaattcgctgtgctctgggccatgatcctgatcgggtaaataatatccccagtacccctgacgtacgctctggatgaatggtttaataccgtcatttctcgcatgcagacgaccgccaaagcgacgacgcaccgtgttccagacataatcaaaaaccgggttgccctgattatggaacatcgctgccattttctgcccttggctggccatcagcatggcaggaatatcgacggcccaaccgtgcggcaccagaaagataactttctcgttattacgccgcatctcttcgatgatctccagcccttgccagtcaacgcgcggctgaattttctccggcccgcgtattgccaactcagccatcattgccatcgcttgcggcgcggtggcaaacatctcatcaacaatcgcttcgcgttcagcttcactacgttctggaaagcagaggctcagattgattaacgcacgacggcgactgctttttcccagtcgtccggcaaaacgtcccagccgtgccagaatgggatcacggaactttggcggcgttaaagcgatacccgccatcgctgctacgcccagccatgctccccagtagcgcgggtggcgaaaggatttatcaaactcaggaatgtattcgctattattttttttcgtttccatgcttttccagtttcggataaggcaaaaatcaatctggtgatagtgtagcggcgcaacttgccccgcaccaaataaaaaaagccggtactgactgcgtaccggctgcgaatggatgttaattaatcaaaccgtagctgcggcacaatctctttggcctgcgccaggaattcgcgacgatcggagccggtcagcccttcggtacgcggcagttttgccgtcagcgggtttacggcctgctggtttatccatacttcatagtgcagatgcggcccggtactacgtccggtattaccggaaagcgcgatacggtcgccacgtttcaccttctgtcccggtttcaccagaatcttgcgcaagtgcatataacgcgtggtgtagctgcgaccatgacgaatagccacataataacctgctgcgccactgcgtttggcaaccaccacttcaccgtcacccacactaagcactggcgtaccctgcggcatggcgaaatcaacacctctgtgtggtgcaacgcgaccggtcaccggattagtacgacgcgggttaaaattagagctgatacggaactgtttcgccgtcgggaatcgcaagaatcctttcgccagaccagtaccgttacgatcgtagaatttgccatcttcagcgcggatagcgtaataatctttaccttcactacgcaaacgtacgcccagcagctggctttgctcacgtttaccatcaagcatttctcgagacattaacaccgcaaattcatcgccttttttcagtttgcggaaatccatttgccactgcatggctttaatcactgcgctcacttcggcgctggttaaaccggcgtttctggcgctggcaacaaagcttcccccgacggtacctttcagcagattgttaacccactctccttgctgcatttcgctggtcattttaaaaccgttagcggcagtacggtcataggttcgggtttcacgacgagacacttcccaggtgaggcgctgcagttcgccgtccgcggttaatgtccaggagagttgttgaccgattttcaggttacgcaattctttgtcggccgcagccagttgggtgatatcacccatatcaataccatactgattgagaatgctgcttagcgtatcgccagtggaaacaacatattcatgcacgcccgcttcaccggcgattttgtcatccagttcgtcctggggaatggcttcatcttcttgtgcagcttgatcaatcggctcactggcttcaggtaagaggctacgaatttcgttctgttccagctcaatggttttgacaattggcgtggcatcacggtgataaacataaggccgccagacagcgacggccagagtaagaacggtgaggctccccaacataacgcggtgtggtcgcggtaaattattaaacgccagggcgacagagcgggctatctgttgcacgtaatcacttcctcattaatctcctttcaggcagctcgcatactggttggctaattgactcaggaattcactatagcttgttttacccagtttgatattcgtccccaggggatccaacgttcccatacgaacggatgtccctcgtgcgacgctctcaacgaccgctggcctgaactgtggctcagcaaaaacgcaggttgctttttgctcaaccaactgtgttcttatttcatgtaaacgctgcgcgccaggttgaatctcagggttaacggtaaaatgaccaagcggtgtcagtccaaactgtttttcgaaatagccgtaagcatcgtgaaaaacgaaataacctttccccttgagcggcgcgagctcgttaccaacctgcgtttcggtactggctaattgtgcctcaaaatccttcaggttggcgtcaagtttggctcgactttgcggcataagttccactaattttccatggattgcaaccgctgtagcccgcgctatctctggggaaagccaaagatgcatgttgaaatcgccgtgatggtgatcttcgtcacttttttccgcgtggtcgtgatcatcatcatcgccgtgaatacttttcatcagtagcggtttcacatcttcaagctgcgcaatcgttacctgcttcgctcctggtaatttgcttaccggtttttgcataaacgcttccatctccgggccaacccaaacgactaagtccgcgttctgtaagcgttttacatcgcttgggcgcagactataatcatgttcactagcgccgtcaggaagtaaaacctctgtttctgttaccccatcagcaatggcagaagcgatgaacccaacgggtttaaggctagcgacaacggcggcatctgcggcctgtgttgcacctccccagagagcggcggataatgctgcgaaaagaagcgtttttttatgtaacataatgcgaccaataatcgtaatgaatatgagaagtgtgatattataacatttcatgactactgcaagactaaaattaacatgacaagtctggtttccctggaaaatgtcagcgtttcttttggccaacgccgcgtcctctctgatgtgagcctggaacttaaacctggaaaaattttgactttacttgggccaaatggcgcaggtaagagcacactggtacgggtagtgctcgggctggtaacacccgatgaaggggttatcaagcgcaacggaaaactgcgcatcggctatgtaccgcagaagctgtatctcgacaccacgttgccactgaccgtaaaccgttttttacgcttacgccctggtacacataaagaagatattttgcctgcactgaaacgtgtccaggccgggcacctgattaacgcaccgatgcaaaagctctctggtggcgaaacgcagcgtgtactattagcgcgagcattgttaaatcgcccgcaattattagtgctggatgaacccactcaaggcgtggatgtaaatggccaggtggcgttatatgaccttattgaccaactgcgtcgtgaactggattgtggcgttttaatggtttctcacgatctgcatctggtgatggcaaaaaccgatgaagtgctgtgcctgaatcaccacatttgttgttccggcacaccggaagttgtttccctgcatccggagtttattagtatgtttggtcctcgtggtgctgaacaactgggtatctatcgccatcatcataaccatcgtcacgatttacagggacgaattgttttgcgtcggggaaatgatcgcagttgatttaacgtcggggaaatgatcgctcatgattgaattattatttcccggttggttagccgggatcatgctcgcctgtgccgcgggtccgctgggtagctttgtagtctggcgtcgtatgtcttatttcggtgatacgctggctcatgccagtttacttggcgtcgcgtttggtttgttgctggacgtgaatccattctatgcggtgattgccgttacgctgctgctggcgggcggtctggtatggctggagaagcgtccacagctggcgatcgacacgttattagggattatggcgcacagtgccctgagcctgggcctggtggtcgtgagtctgatgtctaatattcgtgttgatttgatggcttacctgttcggtgatttgctggcagtgacgccagaagatctcatctctattgcgattggcgtggtcatcgtggtggctattttgttctggcaatggcgcaatttgctgagtatgacgataagcccggatctggcgtttgttgatggtgtgaaattacagcgagtgaaattgttgttgatgctggtgacggcattgacgattggtgtagcgatgaaatttgtcggtgcgttgattattactagcttgctgattattcctgctgctactgcgcgtcgctttgcccgcacgccggaacagatggctggtgtcgctgttttggtggggatggtggcagtgactggcggtttaaccttttccgcggtttacgatacgccggcgggtccgagcgtggtgctatgtgcggcactgttatttattctcagtatgatgaaaaagcaggccagctaatctatcgctgaacacatttgtcggatgcggcgcgagcgccttatccgacctacggttcggtatctctggtagtcctggtaagacgcgaacagcgtcgcatcaggcatattgccagtgccggatgcggcgcgagcgaccaatccgacttacggcatttctggcggcgttatgccaaagtgattccacgcccgcgtcgtcgccatacgcccacgcggtgtacgctgcaaaaagccttgctgaatcaaataaggttccagcacatcctcaatggtttcacgttcttcgccaatggctgccgccaggttatccagacctacaggtccaccaaagaacttatcgattaccgccagcaacaatttgcggtccatataatcgaaaccttcagcatcgacattcaacatatccagcgcctgagcagcgatatctgcgctgatggtgccatcgtgcttcacttcggcgaaatcacgcactcgacgcagcagacggttggcaatgcgcggcgtaccgcgagcgcgacgagcaacttccagcgcgccgtcatcactcatctcaagccccataaagcgtgcgctgcgactgacgatatattgcagatccggcacctgataaaactccagacgttgcacaataccaaaacggtcgcgcaacggacttgtcaggctacctgcgcgcgtggttgcaccaatcagggtaaacggcggcaaatcaattttaatggagcgtgccgccggaccttcaccaatcatgatatccagttggtagtcttccattgccgggtacagcacttcttcaacaactgggcttagacggtggatctcatcaataaacagcacgtcatgcggttcaaggttagtgagcatcgcagccaaatcgcccgccttttccagcaccggaccagaagtcgtgcgtaaattaacgcccatttcattggcgacaatgttggcaagcgtagttttacccaaccccggaggaccaaaaatcaacaaatgatcgagggcatcgccgcgcagtttcgctgctttgatgaaaatctccatctgactacgaacctgcggctgaccaacatactcttccagtaatttggggcgaatggcgcgatctgctacatcttccggcaaagtggtaccggcagaaatcagacggtctgcttcaatcatcctttacctcataacgcggcgcgtagggcttcgcgaattaaagtttcactgctggcgtcagggcgagcgattttgctcaccatgcggcttgcttcttgtggtttatagcccagcgccaccagcgcggcaaccgcttcttgttcagcatcgtcggtcgccgggctggcaggagacgtgagtaccaggtcggcggctggcgtaaagagatcgccatgcaaacctttaaatcggtctttcatttcaacaatcaagcgttcggcggtttttttgccaatacccggcagtttcaccagtgcccccacttcttcacgctcaacggcattaacgaactgctgcgcactcattccggagaggatcgccagcgccaacttcgggccgacgccgttggttttgatcaactctttgaacaatgtgcgctcttgtttattgttaaaaccgtacagcagttgcgcgtcttcacgcaccacaaagtgggtgaaaacgatcgcttcctgacccgcttcagggagttcataaaaacaggtcatcggcatatgcacttcatagcctacgccgcccacttcaattaacaccagcgggggttgtttttcaatgatgatgcctctgagtctgcctatcacatgacgctcctgcgtaatgaatcaaagataatgctgtatgataaaaaaatgctggatagatatccagcgaaggatgaagaaaacttgcgaggtgtctcgatgaactgaaaaatggcacagtataatttattctacaggttatattggaagcaaatattttaatattacatattcagtgaagaaatgcgtaataaaaatatacattgcgcctcctgaaaaaataaattttttatgctattacgtatatttgtatctatttcaatggaatgacaacgtgaatattaattaccctgctgaatatgaaattggagatatcgtctttacatgtataggtgctgccttatttggtcaaataagtgctgcaagtaattgctggagtaatcacgtcgggatcattatcggtcataacggtgaagacttcctggttgcagaaagccgggttccccttagtaccatcaccacgctatctcgttttattaaacgtagctctaatcaacgctatgctataaagcgattagacgctgggctgacagaacgacaaaaacaacgaattgttgaacaggttccctcccggctacgcaaactttaccacaccggttttaaatacgaatctagccgccagttctgtagtaaatttgtttttgatatttataaagaagcgctatgtattccggtgggtgaaatagagacgtttggagaattgttaaatagcaatccgaatgcaaaactcactttctggaaattctggttcctgggttctattccgtgggagcgtaaaaccgtcacgccagccagtttgtggcatcatccgggtttggtgttgattcatgcggagggagtggaaacgcctcagccggaactgaccgaggcggtataacttaacgcagtcgccctctcgccaggttcagccggctttcgctcatctgcatcgcattctgactaacgtggcagtgggtgatagcaatcgccagcgcatcggcggcatccgcctgtggattagcgggcagtttcagcaaggtgcggaccatatgctgcacctggcttttttcggcactgccaatacctaccaccgtttgctttacctgacgtgccgcgtattcaaatactggcaactcctgattcaccgccgccacaatcgccacgccgcgcgcctggcccagtttcagggcactgtcagcgttctttgccataaagacttgttcaatggcgaaataatcaggctggaactgggtgatgatttccgtcacgcccgcatagatgagtttcagacgagacggtaaatcatccactttggtgcggatgcatccgctacccaggtaggacagttgcctacctacctggcggatgacgccgtagccggtcacgcggctacccggatcaatgccgagaataatagccatcacgcgtctccgttttgctgtttagcaggcctcatcagagagtcgctgcgacctcatcagagatttcaccgttatggtaaacttcctgcacgtcgtcgcaatcttccagcatatcgatcagacgcatcagtttcggtgcggtttctgcatccatatcagctttggtagacgggatcatggaaacttccgcgctgtctgctttcagacctgccgcttccagagcgtcgcgcactttacccatttcttcccatgcagtgtagacatcaatcgcgccgtcatcataggtcacaacgtcttcagcacctgcttccagtgctgcttccatgatggtgtcttcatcgcctttctcgaaggagatcacgccttttttgctgaacagataggcaacggaaccatcagtaccgaggttaccgccacatttgctaaatgcatgacgcacttcagcaacggtacggttgcggttgtcagacagacattcaatcatgattgccgtgccgccaggaccgtaaccttcgtagatgatggtttccatgtttgcatcatcatcaccgcccacaccacgtgcaattgcgcggttcagtgtgtcacgggtcatgttgttagacagtgctttatccaccgccgcacgcagacgcgggttagcgtccggatcgccaccgcccagcttagccgcggttaccagctcacgaatgattttagtgaagattttaccgcgcttagcatcctgcgcagctttacgatgtctggtgttggcccatttactatgacctgccataaaaatatctccagatagccctgcctgttcaggcagcgttaattacaaactgttcaatcgcctgccggttgctccaggacttagtgagcgccgccgcagcaggcgcatcaagccacttgtaagccagatgttcagtgaaaacgatctgccgctcgtgcggaagcgcaagacagaaccaactttccgtattacgcgtcacgcccggcgcatagcgatgacgtaaatgactaaaaatttcaaactctaccgtgcgctgacagtcaattaaggtcagttgttcagcgacaacatcaatggtgacctcttcctttacttcgcgcatggcagcttgcggcgcggtttcaccctcttccacgctgccggttacgctctgccagaaatcgggatcgtcacgccgctgcaacatcagcacccgtttcgtatcttgtgcgtagatgaccactaagatgctaacgggacgcttatacactttatccttcacgctgcctcttcgttgactgccttcgctcatcccattcacatagttatctatgctcatgggagttcactcagttgccgcctcgatgcaacgcgaatgatttcgtgtatttgagtcatatcagttattctcagccttcttcacaacctgaatgctcagctcagccagtgcagtcgggttagcaaagctcggtgcttcagtcatcagacacgctgccgccgtggttttcgggaaggcgataacgtcacggatattgtcggtgccggtcagcagcatggtcagacggtcaagaccgaatgccagacctgcgtgcggcggagtaccgtatttcagagcgtcgagcaggaagccgaatttctcgcgctgttcctcttcgttgatacccagaataccaaacaccgtctgctgcatatcaccattatggatacgtacactaccaccgcccacttcgtaaccattgatgaccatatcgtaagcgttcgccaccgcattttccggtgcagctttcagttctgcagccgtcatatctttcggactggtgaacggatggtgcattgccgtcaggccgccttcaccgtcgtcttcaaacatcgggaagtcgataacccacagcggtgcccatttgctttcgtcggtcagaccaaggtctttacccactttcaggcgcagtgcacccatcgcgtcggcaacaattttcttgttgtcggcaccgaagaaaatcatatcgccatcttgcgcggcagtacgatccaggatgtcttcgatgatttctgcattaaggaacttcgctaccgggctgttgataccttccagacctttcgcgcgttcgttaactttgatgtaagccagacctttcgcgccgtagattttaacgaagttaccgtattcgtcgatctgcttacgggtcaggcttgcgccgcccggaacgcgcagagccgctacgcgacctttcggatcgttcgccggacctgcaaatacagcaaactcaacagatttcagcagatcagcaacgtcagtcagttccatcgggttacgcagatccggtttatcagaaccataacggcgttctgcttccgcaaaggtcattaccgggaaatcgcccagatccacacccttcacttccagccacagatgacgcaccagcgcttccatcacttcacgcacttgcggcgcggtcatgaaagaagtttccacatcgatctgagtaaattcaggctgacggtcagcacgcaggtcttcgtcacggaagcatttaacgatctgatagtaacggtcaaaaccggacatcatcagcagctgtttgaacaactgcggggattgcggcagtgcgtagaatttacctttgtgcacacgagaaggcaccaggtagtcacgcgcgccttccggcgtggctttggtcagcatcggagtttcgatgtcgaggaagccgtggtcatccataaaacggcgcaccaggctggtgattttagcgcgggttttcaggcgctgagccatttccggacgacgcaggtcgaggtagcggtatttcagacgcgcttcttcggtgttgacgtggttagagtcaagcggcagaacatctgcgcggttgatgatagtcaggctggacgccagcacttcgatttcgccggtcgccatatcgcggttaatatttttttcgtcacgcgcacgtacggtgcccgtgacctgaatgcagaactcattacgcagttcagaggccagctttaacgcgtccgcacgatccggatcgaaaaatacctgcacgataccttcgcggtcgcgcatatcgatgaagatcaggctaccaagatcacgacgacggttgacccaaccacacagagtcacctgctgccccacgtgggacaaacggagctgtccacaatattctgtacgcatgagatatcccttaacttagctgccggcggatgccccctgctgcgcaggtgaccaagtcgcagcgttagctgtatgtcacaactgaatgaaaaaaggcggctattatactggaaattctgccgcaccgtaagagcctggcccgcgctggaacgcctcgttaccactttatatcgggcctgaaatcagactctacgccagtttgctataaaggtgttgcccgaactcataaaaattaacaaaatttgtcgttccgccatcggctaatcgcattaaggtgtgaggcacgattttgttttttcaggagtcattatgcttgaacttaatgctaaaaccactgcgctggtggtgatcgatttacaagaaggcatcttaccttttgccggtggtccacatactgccgatgaggtagttaatcgcgccgggaagctggcggcgaaatttcgcgccagcggtcagcccgtgtttctggtgcgcgttggctggtctgccgattacgctgaagcattaaaacagccggtcgatgcgcccagtccggctaaagtgttgcccgaaaattggtggcaacatcctgctgcattaggtgcaaccgacagcgatatcgaaatcatcaaacgtcaatggggtgcgttttacggtacggatctggagttgcaattacgccgccgaggtatcgatacaatagtgttatgtgggatcagcaccaatatcggtgttgaatccaccgcccgcaatgcctgggaacttggctttaatctggtgattgccgaagacgcctgtagtgccgccagcgccgagcagcacaataacagtatcaaccatatctacccgcgcatcgcccgtgtgcgtagcgtggaagagatcctcaacgcgttatgatttacatcggtctaccgcaatggagccatcctaaatgggtgcggttggggatcaccagccttgaagagtatgcccgccactttaactgcgtggagggcaacaccacgctttacgccctgccgaaacccgaggttgtcctgcgctggcgtgagcagaccacagatgacttccgcttctgttttaagtttccggcgaccattagccatcaggcagcattacggcattgcgatgatttagtgactgaatttttgacccgcatgagtccgttggctccgcgcattgggcaatactggctgcaactgcctgccacattcggcccacgggagctgcctgcgctttggcattttctcgattctcttcctggcgaatttaattatggcgtggaagtccgccatccacagtttttcgccaaaggagaagaggaacaaacgcttaatcgcggtttacatcagcgcggcgttaatcgggtgattttagacagccgcccggttcatgcagcacgtccacacagtgaagctattcgcgacgctcaacgaaaaaaacctaaagttccggtacatgctgtactgacggcgacaaatccgctgatccgttttatcggtagtgatgatatgacgcaaaaccgggaattatttcaggtctggttacaaaaattagcgcagtggcatcagaccactacgccttatctttttttacatacgccagacattgcccaggcaccggaactggtacataccctgtgggaagacttacgtaaaacgcttccagagatcggagcagttccggctattccacagcaatcttctcttttctgaatttgccacctatcatagacaggtgccatcggccattttaaagggagtttgtatggtaagcgcgctgtacgccgttttaagtgcgttgttattaatgaagttctcttttgatgtcgttcgcctgcgaatgcagtaccgcgttgcctatggcgacggcggttttagcgaactgcaaagcgctattcgcattcatggtaacgcggtggaatatattcccatcgcgattgtgctgatgctgtttatggaaatgaatggcgcagaaacctggatggtgcatatttgcggcatcgttttgcttgctggtcgtctgatgcattattacggttttcatcaccgtctgttccgctggcgacgttccggcatgagcgccacctggtgtgcgctgttgctgatggtgctggcgaatctttggtatatgccctgggagttggttttctccctgcgttaacgcacaatacgccactttctttttcccggatttttacgttatgtctcaccgcgacacgctattttctgcccctatcgccagactgggcgactggacctttgatgaacgggtagctgaagtcttcccggatatgatccagcgttccgtacccggctattccaatattatttccatgattggtatgttagccgagcgcttcgttcaacctggtacgcaggtttacgatctgggttgttctctgggcgcggcgacgctcagcgtgcgtcgcaacattcatcatgataattgcaaaattattgccatcgacaactccccggcgatgattgaacgctgccgtcgtcatattgacgcctataaagcccctacgccagtagacgtcattgaaggtgatattcgcgatatcgccattgaaaacgcaagcatggtggtgctgaattttaccctgcaattcctggaaccttccgagcgccaggcgttactggataaaatttatcaagggctgaaccccggcggcgcgctggtgcttagcgaaaaattcagtttcgaagatgccaaagttggtgaactgttgttcaacatgcaccacgactttaaacgtgccaacggttacagcgaactggagatcagccagaagcgcagcatgctggaaaacgtgatgctgaccgattccgtggaaacccataaagcacgcctgcataacgccggttttgagcatagtgagctgtggttccagtgctttaactttggtagtctggtggcattaaaagcagaggacgctgcatgatcgactttggtaacttttattctctgattgccaaaaatcatcttagtcactggctcgaaacgctgcccgcgcagattgctaactggcagcgcgagcagcagcacgggttgtttaagcagtggagtaatgcggtggagtttctacctgaaattaaaccgtatcgtcttgatttattgcatagcgttacggcagaaagcgaagagccactgagcgcagggcaaattaaacgcattgaaacgctgatgcgcaacctgatgccgtggcgcaaagggccgttcagtctgtatggcgtcaacatcgataccgaatggcgttccgactggaaatgggatcgtgttctgccccatctttctgatttaaccggacgcaccattctggatgtcggctgcggcagcggttatcacatgtggcgcatgattggcgcaggcgcgcacctcgcggtggggatcgaccctacgcaactgtttctgtgccagtttgaagcggtgcgtaaactactgggtaatgatcagcgcgcgcatttgttaccgttaggtattgaacaacttccggcactgaaagcctttgataccgtctttagcatgggcgtgctttaccatcgccgtagtccgctggagcatctatggcagttgaaagatcaactggtcaatgaaggtgaactggtgctggaaacgctggttattgatggtgatgagaacacggtgctggtaccaggcgatcgttacgcgcaaatgcgtaatgtctatttcatcccttccgcgctggcgctgaaaaactggctgaagaagtgtggttttgtagatatccgcattgcggatgtgagcgttaccaccacagaagagcagcgacgcaccgaatggatggttaccgaaagcctggccgatttcctcgacccacatgatccgggtaaaacggtggaaggttatccggcacctaaacgcgcggtgctgattgcgcgcaagccgtaaaggtctggtattactgccggatgcggcgtgaacgccttatccggcctacaaaaccttgctaattcaatatattgcagggactatgtaggcctgataagcatagcgcatcaggcagctttacgtttgcataacctcagcgcccgtttccgggcgctattcacgtcttacgcctgaacagctggctgatcaaacgccgttaacttcggtgcattgcccgtatatttttcgatatacaccaacgcactgttaccggcacaggcatttgccagctggctgctggggatatccgccgttaacacgttcgcactgccgtttttacacaagccattttccagatctggccatgcaccttcatgcacgcataccacgccttttttgatcccgtcagtcaccaccgcgcctgtcaaaatctgaccacgtttgttccagacacgcaccagatcgccattcgcaataccaaagcgtgcagcatcttcggtgtgaatagtgattggttcacgatcggcgatcgcatattttttacgcagttccgcatagttaagctgactgtgtaaacggtgtgccggatgtgcggtcagaagctgtaactgcttctcgtcggcggtacctttccattcatcaggagccagccaggttgggtgtgccgggcaatccttatagccaaatttttccaacgttttactatagatttcaattttgccgcttggcgtacccagcgcatttttcaccggatcggcgcggaaatcaccataacgaacgtactgttcgttcttctcgctgtggcgcatttcgatcagtttattttgctgccagaaggcattaaacattggcatagtgacgcgttgcgcacgggcacctttctgagcggcatcatagaaaaatttcagccacgccatttcatctttaccttcggtatagatctcttttccgccaggtttgagtaattccgcaagatcggcaaacacgtcaaaatcgttacgcgcttcaaattgcggagcaacagcctgcttcatcggcacaatatgctggttgctgtaatcaccggtcatcgtcaagtcattgcgctcaaagcttgtggtgatcggtaatacgatatctgcgtgtttggctgctgcggtccagtagcattcagaaacgacgatcatctccggtttctgccatgctttaatcagacgattagtatcctggtgatgggtaaagttaccgccacccgcccaccagatcattttgatattcggatacgtttgttctttaccgttatgctgatatttgccgccaggattttccagcgcatcgacgatacgggcaacaggaatcgccgtcattccgccatcatcagcggcctcgctggcatgtccggcaatcgccgcagacatttccggcagcacgccgccaacacgcgtcgggttgccaccgttggagtaatgataagagaaaccaaaaccgccgcccggtgtaccaatctgccctaacatcgccgccagcgtcaccagcatccagtgtttctgttcaccatattgctggcgctgaattccccagcctgccatcagcattgtgcgattcgccgccatcagttcagcgagtttgactatctgcgcttccggtacgccagtaatttccgccgcccagaccgcgctcttcggcgtattatcgctcttacctgtcagatactcttcaaactgcggatacccggtagtgtatttttcaaggaacactttatcgtgtttgccttgtgtcatcagggtatgcgcaatccctaacatcagtgccacgtcggtgcccatattcggcgcgatccaggtggcattatcgtcaaagaattcgatggtttcggagcggataggatcaatggcaatcactggtttgccagattttttcagctgatggaagtattccagcccttgctcatcggtactgctccaggcaatttttaaggtattcagcgggttcattccccacagcaccacaacctggctgttttccagaatcagcggccaggaggtctgctgttcatacacctctacagaaccgaccacatgcggcatgatcacctgtgctgccccggtactataatcgccgctatgcccggaataaccgcccgccaggttcatataacgttgcagtaaggtttgcgctttatgcaacacgccagaagagcgccagccgtaagatccggcaaaaatggcgcttggtccgttagctttacgaatacgatcatgttgctcatgaatcagttttaatgcctgttcccagctcacctgtacataggtatcttcgccacgacctttcgccggttgcagtggattatcgagatagctttttctcaccatcggatgctgaatacgcgccgtggtgtgtacctgatccgccgccgtagactgtaaggaattcggtatggttttcgccagcgcgcctgtactagaaacaatcttgccgtccttcacttctacgttcatcgctccccaacgtcccgcggtgaggattttaccgcccttctcttctgcccatgcggggagcggtgctgcgcttgtcaccaccagcgctccagcggcaataccgctgtgtttaataaattcacgtcttgttaatgtcataacttcctccctgatcaacgaggatcactgtttctcggtaatatctttggcgttgtactggaaataccgcgttaaaatgtccagttcgttttcgctcatgctggttcgtgcccccattcctttggcaatggacggccacgcattgacggtgtaatggtcggcggcaataggggcatgacaaccagcgcaataggtatcgtcaagtttttcagcgtattgccatagcggtttacggtccgctaatgcgggatcggtaagcgcaccctgtaaagacgcctgacgccattgattgccgtattcgtcagcctgccattccccgtttacagtgagcgccttgataccttcttcacttaatgtggctagcgccagccgttgacctgccgccaggtagagcgtgttttcactgccctgcatttgataaccctgcaacagaacgatcggctgtttgccactggcatcaacgacggtgagatcggttccaggattcacggtagccagctcgcctatgtgagaagttttgaaaggataaatatgtgcgccattagtaacactagtagcggcctgactttccagctcatgcgccgcgttgtcatccatttttatttctggcggaaaatgggcaatgcctttatgacaatcgatacaggtttcgctgtccttttgtgctttgttatgcattttctgcgcagattcactttggctggcaatatccatggcatcaaaagaatggcaactacggcacgttgcagagtcagtggcttttaattctttccatactgtttcggccatttcctggcgatgagcttcgaacttatcgtcactgtctattttgccgctaacaaattcatgataaatatctttagatgcctttaatttagcaaataaataatccatcccactctttggaatatggcaatcggcacattccgcacgtatccctttctggttgctaaagtggacagttccctgatattcctcaaaaggtttactcatgctgtggcaggaaaggcaaaatgctgtatcgctcgttttatgtaagactttttgcgccagcaataacccgccgccaccaaccacaaccgctatcagcaaaaacaataacccaatgcgttttttccctcgcatagattcctctaattaaattactggacaccgaaatcattgtataattaaatatacaacgaattaaccgcttgcataattaggcacaacactgcctgaaacaatcgataaagaatatgatttattacaatgtaatcattaattgctaaggaataacccagttgctatttagaatatatatttatcagttttagtaatttaaatcccataattaatgtgaatatatacaatatttttagcacaacgctatgcgcactgtcacccgctcaacagatcacggttatcgttcgttttttatactgttcagggataaaaaaaggcccctgttgaaattgcaggggcctggtacgagcaagcatcatattgggcgacatgatgcaacggtaaaaatcatttggcctgatggcgttcaatgattcctttcatttcagcaaccgccgccccgtctacgatataacggctatactcgtccgcgtgttcatcactactcatggacaatccttgattacgataacgcatcggactggcttgccacgctcccgcggagctatggacttccagcactccggcatcgaggaagtggtgcaggttttctgcacggactcctgctccggccataatgattggagcatcacgatgggcaataagttccataattttacttaaaccttgcagtgcgtcacttttttgcccacttgtcagtacccgggcaatgcccaattccgcaagattattgagtgtatataaagggttagcgcacatatcgaaggcgcgatgaaaagtcactgccagcggaccggcagcagccattattttttccattcgtggcatatcgacattcccgtcaacatcgagaacgcccgtcaccagtccaggaaaacctaattcgcggaccgtgcgcacatcctcaagaatggcggcaaactcaccgtcgctgtagcaaaaatcaccaccgcgtgggcgaattatcggatgcacagggatcgtcacccgctggcgcacggatttcagtacacccaagctcggcgttaagcccccctcttttggggctgcgcataattcaactctgtctgcgccgttttgctgcgccgttagtgcacattccatgctgtaacagcaaatttccagtaatgccatttttactccttaattacgcgctctgctcgctggcaacgatctcttcaatggaccacggatgaaacttaatagttgttttgccatcggtgaccgccagcgtcggattcggtaatcgctcatgctcaccttttgggctactggttttcacactgatccccggtaggctgagtccttcatcagaaagcaatgccagcgcacgggcattcagcgtttctggatcacccggcagaacgatttcaatatgttcccaaccttcgtgtgggtaacgtttttccccgggccacggtagctccacaatagaaaactgccagtgcgcaacctgtaccggttcatgcaatttaaacagacaaatcggtctgccattgatcatattttcactcaaaagctcgccacactgttcaaacccgcgacgccagcgttcagcagtggcgttttgatggcaacgcaaagaaatgtgatcggcagtcagcggagtgatattcaaccccagacggcgggaaagttcatctaatgcgtggataaatcgcggtaaatcgcttgcaatatcctgcagctcgtcgatagattgccagttcgccataatcactcttcgtctttcagtaaaagcgttaatttaccctgttgccctgtgccaaccaaccgctgatttcacgccgcttctgatgcaatagtgaaaacggcaatacgccacgcgcacgttgctgacgaaaacagccatttgcagtatactcccgccctaatttctttaactggtgcgggcaatttttgctcgcttcatcaatgtaaggtattccggtgaatattcaggctcttctcagtgaaaaagtccgtcaggccatgattgcggcaggcgcgcctgcggattgcgaaccgcaggttcgtcagagtgcaaaagttcagttcggcgactatcaggctaacggcatgatggcagttgctaaaaaactgggtatggcaccgcgacaattagcagagcaggtgctgactcatctggatcttaacggtatcgccagcaaagttgagatcgccggtccaggctttatcaacattttccttgatccggcattcctggctgaacatgttcagcaggcgctggcgtccgatcgtctcggtgttgctacgccagaaaaacagaccattgtggttgactactctgcgccaaacgtggcgaaagagatgcatgtcggtcacctgcgctctaccattattggtgacgcagcagtgcgtactctggagttcctcggtcacaaagtgattcgcgcaaaccacgtcggcgactggggcactcagttcggtatgctgattgcatggctggaaaagcagcagcaggaaaacgccggtgaaatggagctggctgaccttgaaggtttctaccgcgatgcgaaaaagcattacgatgaagatgaagagttcgccgagcgcgcacgtaactacgtggtaaaactgcaaagcggtgacgaatatttccgcgagatgtggcgcaaactggtcgacatcaccatgacgcagaaccagatcacctacgatcgtctcaacgtgacgctgacccgtgatgacgtgatgggcgaaagcctctacaacccgatgctgccaggaattgtggcggatctcaaagccaaaggtctggcagtagaaagcgaaggggcgaccgtcgtattccttgatgagtttaaaaacaaggaaggcgaaccgatgggcgtgatcattcagaagaaagatggcggctatctctacaccaccactgatatcgcctgtgcgaaatatcgttatgaaacactgcatgccgatcgcgtgctgtattacatcgactcccgtcagcatcaacacctgatgcaggcatgggcgatcgtccgtaaagcaggctatgtaccggaatccgtaccgctggaacaccacatgttcggcatgatgctgggtaaagacggcaaaccgttcaaaacccgcgcgggtggtacagtgaaactggccgatctgctggatgaagccctggaacgtgcacgccgtctggtggcagaaaagaacccggatatgccagccgacgagctggaaaaactggctaacgcggttggtattggtgcggtgaaatatgcggatctctccaaaaaccgcaccacggactacatcttcgactgggacaacatgctggcgtttgagggtaataccgcgccatacatgcagtatgcatacacgcgtgtattgtccgtgttccgtaaagcagaaattgacgaagagcaactggctgcagctccggttatcatccgtgaagatcgtgaagcgcaactggcagctcgcctgctgcagtttgaagaaaccctcaccgtggttgcccgtgaaggcacgccgcatgtaatgtgtgcttacctgtacgatctggccggtctgttctctggcttctacgagcactgcccgatcctcagcgcagaaaacgaagaagtgcgtaacagccgtctaaaactggcacaactgacggcgaagacgctgaagctgggtctggatacgctgggtattgagactgtagagcgtatgtaatcgatttttcgtgagagtgaagcctgatcagggttagccgatcaggcttttttattgccatctaaatgtattctgaaaatggacatgccattgttttctcactgttggataagaggccagaagcgtaatatccggccccagggaaacgataacggttgaatttaaggaataccgcagtgtttaaatttcttgtattaacattaggcattatctcttgccaggcttacgcagaagatacggttatagtaaacgaccatgacattagtgccatcaaagattgttggcaaaaaaatagtgatgatgatactgacgttaacgtgatcaaaagttgcctgcgacaagaatacaatctcgtcgatgcgcaattaaataaagcctatggtgaagcttatcgttatatagaacaagtgccacgcacaggtgtaaaaaaacctgataccgaacaacttaacttgcttaaaaaaagtcagcgagcctggctggattttagggacaaagaatgtgaattaatccttagtaatgaggacgttcaggatttaagtgacccttattctgaaagtgaatggctcagttgtatgatcatacagaccaatacgcgaactcgccagttgcagctataccgtaactctgaagatttttatccaagccctttgacaagaggataattcacatctttttggcatgttttgttgcaagctattcctgataaataattgcaacaagacatcgagcctttttcactgagttattaaacatactcgcgagcgcgtcgctacgctagcaagcaaaaatgaaacaggaataatcgaaatgggatgttgcgcacagtcaaaataactcaccgtaaataatcatctgctataaataatcactttcatgcaataccagataagctatttttaaacagacacttaccgcacaacaaactaattaaatacaaagaaaggcaacaatcaacttaatgttaatgaaatgttttacatatattaaccacttgtttaatgcggagaatcagtacactattttcttataattacatttgaaattatatgatcaccgggagtgattgattaattatctttactaataatcagactaatatttacctgtttgaccgagttgggattgcgtcgtttctccattaggagtaaagctttaatgtcacctgaagttcacagaataaggaacaggttatgagctatagcaatattcttgtcgctgttgcggttacaccggaaagtcagcaactgctggcaaaagcggtatctatcgccaggccagtaaagggacacatcagtttaattactctcgcttccgacccggaaatgtacaatcaattagctgcgccgatgcttgaagatttacgcagcgtgatgcatgaagaaacgcaaagctttcttgataagttaattcaggatgcggggtatcccgttgacaagacgtttattgcctacggtgagttaagcgaacatattctggaagtatgtcacaagcatcatttcgatttggtgatttgcggtaatcacaatcacagtttctttagccgagcatcctgcagcgcgaaaagagttattgccagtagtgaggtcgatgtgctgttagttccacttacgggagattaaccgctcttacgcaagctttggaaaggtagcaactttatcgcgctgctggctttccgcgcttcgcggaactatctgctttaggtcgctaatgaagcactcctgccagtggttaatatcgtttttcacgataacgtccagcatttctgcatgacgggaaatacgttccgccaggctcatagtcaatgcacgatccagcgcagctgcaacttcgtcacgatcgtaggggttaacaattaacgcgctcgttaactcgtttgccgctcccgcaaattggctaagaacaagaacgcccggattggctgggtcctgagcagcaacatactcttttgctaccaggttcatcccgtcacgcagtggcgtcactaagcccacgtcagagtagcggaatattttcatcagtaatttacggtcaaaatgctgattcaaataataaagcggcgtccagcctaattgcccgtatttaccattaattcgtccagcttcattttcgagctgatgacgaatatcctgataggcttgcacatcaccacggctcgttggtgcaatctgggtataacgaattttaccatgatgctgcggatatttttccagcaacgcttcataggcgagaaaacgctctggcaaacctttggaataatccagccgttcgacagaaaagatattttgtacgtttttcagttccgctttaagttgcgccagttttggcggcagtggcccggcagcctgtttggctatttctttcggttcaatgccgatcgggtagacttctgttcgaaatgctttgccccaggctgtatggctttttgcgctacgtgtcgtgacgcgggtcaggttagaaagacaatccaggaacgccagacgatcgttttctgtctggaaacccagcaaatcataatcacaaagctgttcaagcaaggtgtcatatgtcggcagcgcgttgaagatttccggtgtcgggaaaggaatatgcagaaagaaaccaatgcgattattcactccccgtttgcgtaattcatgcgcaaatggcaacaggtgataatcgtggatccagataatgtcatcgtcttgcaacagcggcagtaatttatctgccagcaacgcatttacgcgtagatagccgtcccaggcaggacgctgaaattgcaccagatcgagccgataatgaaaagcgggccagagaacggcattggagaattggttgtagtattcgtcaaggtcctgttcgctgaggttaaaagaggcccacgtaatgttaccttttttcaccttttttagcggctgatcctcattccctgtttcaccactccagccaaaccacagtccgcctgcggctttcagtgcccccagtatgccaacggcaaggccaccggcactggcggcgtgctcgtctggtggtgcaatccggttagatactacgactaaacgactcatagtcatcactcctgttatttttacttagatactacgactaaagctctcatagtcatcactcctgttattttctcttttttgttgtaatgcggtggttatcatttcaagccagctccagacatccggcacacccgccagtcgccaacttgcctgagttgcacctgtgccaatttttacactcattccgcccagtcggttaacgactgcgaagccagattcatcggttaaatcatcgcccagaaatacgggcgttcgcccgataaagggagcttcctgcataaaagctgcaattgcctcacctttactggtacctctcggtttgatctcgacaacacactttccctgctgtaacgccatttgtggccagatctgagtaatacgttgcgctaatgtcattaatgcgtcttcatgctgcggagcctgacgataatgcagcgcaaaagccatccctttcgcctccagctccgcgccgggatactgagcgatgactgtatgcagttgcacgctaatatcacgcgcaatcgcatccggcagatgaacgatatgtgttttaccattgatgtcacggcgctccgccccatgcacgcccgctaacgggaagcgataaggttttgccagtgcgtcaagctccaccatactgcgcccacttatcaatgccaatgcaccatcacttgcggttgccagtagctgtagtccttgcagaatattgtcaggcacgacgacctgatcgggatgcggtttgatttccgccagcgttccatcaagatcaaaaaaccaggcatatttcgcggatagttcaggggtttcggttaacggttctgtcacccggttctcctccttctcttttcttattgtgttgcgcagaacgcgctttacagacatgtaagtatagacagtgtgacgggggtcgccatttgcaacgaagaacagccaaccgttatggcggttggctatggtgggaaaaaacgctaaattgttgcagaaaaaagcatcagacagtgcgtttcgctttttgcttgtaacggtcgaagatcaccgctgccagcaggattaagccgcgaaccacgtactgcgcgaaaggagaaatattaagcaggttcatggcgttttccacggtgcctaaaattaagatacccgccaccacataactgatttttccgatgccacctttcagagaaacgccacctaaaacgcaggcggagataacaatcagctcataaccaatgctcgtcattggctgcccactggtcatacgactagccagaataattccggctatcgcacttaccaggccactgagaacaaagataataattttggtgcgaacaaccggtacacccgccagacgcgcggcctcttcgttcccgccaatcgccagggtgttacgaccaaaggtggttttattcagcagcaaaccaaagataatcagacacgcgacggtgagccagattggcgcaggcagaccgaaccagttggcgtaaccaagggcaaagaagctttcatcttcgataccgaccgctttaccgtcactaatgatgtacgccagacctcgaacaatctgcatcgttgccaatgtcgtgatcagagcatttattttcagtttggcgataacaaagccattgaccaggccacagagaacgcccagcaacaaccccgctgccacgccaatccacaggctttcagtcaggttaataaccaccgccgtggtgacacccgcacaggcaattacggaggcgacagaaaggtcaaagtcaccggaagcgaggcagaacaacatgccacaagccaccatcccgctcatggaaattgccaggcccaaccctttcatattaatgaaggtggcaaaatttgggacaaaaatggcacaggcgataaagagcaccgcaaacaccaccagcatgccgtactgatcccagatacgcccgaagctgaaactgctcttaggtgcgccagacccgcttgtagaaacagaagacatcatactctccttactcaggcaacagcctggctgactttaggcatcgcaaggctcagtgcctgacgctcatctgcctgctcgtgtaacaattcaccggcgatttcaccttcccgcatcaccacaatccggtcggcaacgccgaggacttcaggtaagtcgctggaggcaaacagcaccgccacgccctgcgccgccagcgcataaattacgttatatatttcgtgcttagcgccaacatcaatgccgcgcgtaggttcatccagcaaaatgaccttcatctcttcgcttaaccagcggcccagaatggctttttgctgatttccgccactgagattcatgatcagttgctccgcgcccggcgttttgatgttgaggctacgaatgtggtgatcggcattgttttcttcccaaccgttgttgattacacaaccgccgagcacatgtttacgtctggcactgatgttgatattgtcgcgaacggagtgcacgggaataatgccttccgctttgcgatcttccgggcagagcatcatgcctgcggcaatggcgtggctcggtttacgaatatcgatcggctgttggtcgatataaacctgaccggcggtgatttgcgtcccgccaaacatgcctttcattaattcgctacgccccgcccctaccagaccaaacagcccaacaatttcaccactgcgaaccgccagacttattggcgtacgcacgcctggtgctttcacagcatcaagacgtaggcgctcctcgccataactacgcggttgccagccgtagatatcgccaatgtcgcgcccgaccatcgcctgcaccagcgcgtcgtggtcaacctgctgcatatcggtaaaggttttgacataacgtccatctttaaagacagtaatggcatcgctgagggcaaatatttcttccatacggtgagaaacgtataagattacccgcccctcttttcgcagttcacgaataacgcggaaaagattgtcgatttcacgggcagagagggagctggttggctcatcaaaggcgataattttggcgttacgcgccagcgctttggcgatttcaaccatctgccactgaccaatggagagatatttcagcggcgtgtccgggtcaatatccataccaagatgtttaagttgtaaacccgcctcataattcagcaaactgcgattcacaatgccgcctttatgcggcagctggccgagatagatgttttccgcgacggtcatttccggcacgagatgcagttcctggtaaataatcgccacgcccgcgttaagtgctgcggtcgtgtcggaaaaggacatttcctgcccattaatcactacagaacccgtggttggcgcatagttgccgctgaggatttttaagagagtactttttcctgcgccattttcacccatcaacgcatgaacctgaccggcatagcagtcaaaactaatatccgtcagcgccttaacgccgggaaacgttttaccgatgccgcgaaaactgagatacggggtagactgttgcataacgtctccgtgaatcactggtcgttcacaccccctctgcatcatgcagaggggaatttttccggcaaattacttaccgcctaaaccttttttctccagttcttctttaaagttgtcacgcgtgatcagtaccacgtcggtaacttcggtaaattttggcggttcaacgtcttttgctacccagttgtaaagcatttcgctggatttatagccatgtacgtccgggcttggcagcagggaaccgtagaagccggttgcctgtgctttagacagttcgctcaccgcatccacaccgttaatgccaatgccgatgatatcggccgctttaaagccctgaccttccgtcgcgcgtacgccgcccagcacggtgctgtcgttcataccgacgatcagccaatgtttaacttccggatgttgaaccagcatactgttggcagcgtcaaatgcccccgggatgtcgttagatttggtaggtacctgataaatttgtttttccgggaatccggccgctttcagcgcatccatagatcccgtagtacggcggcgggcggtatccagttcgttggcggtaatcgccatcaccgcgctttctttgacatcccagccacgtttctgcatctctttatacagttcctggccctgacgttcgccaattttagtcgccgccatcatcaccagcggaacggtatccattggcttacctttggcgttaacaaactggtcatccacggcaatgactttcatatcgtagccacgcgctttcgcgacgatggcagagccgagtttggggtccggagtacaaataacgaaaccttttgcgccactggcagccaggctgtcgatcgcgttcaatgttttttcgccatccggcacggcaatcttaataacctcaaaccctaaatccttcccggctttatcggcaaacttccattcggtctggaaccacggctcttccggttgcttcaccagaaaaccgagcttcaggttctccgccatagcggattgactcataacggctgccagaccaatggctgccagggctttagtaaatttgtgcatggttctctccagctttagtgtcgttttgtgtagggcaaaaacgaatgacattcgttaaattaatcggaaaacaaagcattaccttttaactaaaagataagtgactgtgttgacatagttttagcgagaaattaattctccataggagagcaatatcacatcgcagaattacagtgagaacgtgcataaatttagcgggaaaagacataagggaaagccaatttgtcagacaaattgtcgaatgcacagcagattaatccataagattagcctggaaatccttgttgtctttggtacccatgcgggatgtcttctttttaaccagtcaataggccgcattacctggcgttgagtttttgaaatggtgtaataaccgcaactcaaagatgtggaaaatgcacgtcattcatttcgtcattaattatcactgtgctcattaattaacagaacacgtataatgagagccatctcgcaaaaatgaaaaaacgttttataaaatcatcacttcatcatgaattcaaattcattgattaatatcaacaagatacaaaaagcactatcattaaaattcattgcagttacattgatttcatcaatgaaatgtaaaaatatataaacttgatgatttaagcattttcttatacccgttcagacgttattcttatttcagatcatcgtcagaattgactccacgatcacatttcggaccggcagaaaggaattattctgcaaacagtaattatggtgttttgatttatcttgcacctctccacttctggatataaggatattaggtatggcaaccgctggaatgcttctcaaactcaactctcaaatgaaccgcgagttttacgcatccaatctctaccttcacctgagtaactggtgttctgaacagagtctgaacggcaccgccactttccttcgcgcccaggcacagagtaatgtgacccaaatgatgcgcatgtttaactttatgaagagtgtcggcgctacccccatcgttaaagccattgatgttcccggtgaaaaactgaactctctggaagaactgttccaaaaaacgatggaagaatacgagcaacgttctagtacgttggcacagttagccgatgaagcgaaagaactgaatgatgatagtaccgtcaatttcctgcgcgatctggaaaaagaacagcagcatgatggtctgttgctgcaaaccattcttgatgaagtgcgcagtgcgaaacttgcgggtatgtgccctgtgcagaccgaccaacatgttctgaatgtcgtgagtcaccagctgcattgatcatcatcggcgctaatgcattgcgccgatgaaggttttgagaaaccgctgcctcatctgtttgaagcagcggtttttttaatgggattcaccctgtggggtaaacttgagttcaataagcgcgatggctttttggattgcccgcatggtgaccgggtctgcggcggcgggatggttagtaaagtcgatattcttcagctgactggacattttttcacgaacttcaacgggcgcgattacatcgagaacatccagaatttgtttgataaccaactggcaagcaaccacatcagaaaccaattcctgatcggcattcagcggctgggacatcgtaaactcctgatagcattttgaaagccgttatagtagcgacttcacatcttcagcgatagtcacatccaccgtcatcaggacacaaaaaaacctgccggagcaggttttttgttatcggaacatattgcctggcggtacgtctttgaacgtcttgcaatagttattgaacatacttttcaggattttgcgcagtttcatcgcggcactccgaccatttgttatacaggtgttattgtctttgcgcttataatatgacaaccatcacaaaaatcaatctttatgtgatacaaatcacataaatacccctttaatgttataaaaatgataatcaaaaaacagcccccctatttctgacacctacagatggcaagaaatagcgcctgccaggcgtcttttccggccattgtcgcagcactgtaacgcgtaaaatagtgctttctcttactcttctggctggaccatgagacttctgattctgactcttagtttaataacgctggcggggtgtacggttactcgccaagcccatgtgagcgaagttgacgcggcaacaggtattgtacggttagtttatgaccaggcttttttgcagcatgcccataccgatcgttatgtcagtcgcgggatcgccgatcgcgcatgccagcaggaaggctatacccacgcggtcccctttggtcagccagtaggcaactgtagcctttttgcgggttccttatgtttgaatacggaattcactttgagttatcagtgccatcattccgccttccctgtctttctctaaatattttaatcagcgaggggatcttcgctgattaaagaaatagcggtaatgcgttttattcccattcgtatttttaataattgaagtttatattttaccttttgcaaataataaaataacaaattatagtgacgccacagcaacaaatataacctttgtggagcactatcatgctgaaaccagaaatgattgaaaaacttaatgagcagatgaacctggaactgtactctagtctgctttatcagcaaatgagcgcctggtgcagctatcataccttcgaaggtgctgccgcgttcctgcgccgtcacgcccaggaagagatgacgcatatgcagcgtctgtttgattacctgactgataccggcaatttaccgcgtattaataccgttgaatctccgtttgctgaatattccagtcttgatgaattattccaggaaacctataaacacgaacaattaatcacccagaaaattaacgaactggctcatgctgcaatgaccaatcaggactacccaacatttaatttcctgcaatggtatgtttctgagcagcatgaagaagagaaactgttcaaaagcattattgataaattaagcctggcaggcaaaagcggcgaaggtctgtattttatcgacaaagaactctctaccctcgacacacaaaactaatgctctccggcggcaggtttactgccgccgtttcaaatcagtgacggcaaatcttactctgatcggtgctaaaaccgtctttgctaggtataaatttgccttttgctgccagaaacgctaccagctctcccgctgtcatcccttctgcgctgcaggtgtgaaaacgtgcctgttcaccaaaacgcgctttaatcgcagcttccagactggcatgcgtatattgctcgccactttcaatcatcatatttaacacttcatgaccgtgaatagagtccatcgtccctcctcaaaaaaagcctagcgtagcgattgccgcttatgaagactttgcgccagcgcaggactgaatgctttttattgtacatttatatttacaccatatgtaacgtcggtttgacgaagcagccgttatgccttaacctgcgccgcagatatcactcataaagatcgtcaggacagaagaaagcgtgaaaaacagaaccctgggaagtgtttttatcgtggcgggaaccacaattggcgcaggcatgctggcaatgccgctggctgcggccggtgttggttttagcgttacgttaatcttgttgattgggctttgggcgttgatgtgctacacggcgctattactgctggaggtgtaccagcatgttccggcagataccggtctgggcacgctggcaaaacgctatctgggacgctacggtcaatggctgacgggcttcagtatgatgttcttaatgtatgctctgactgcggcatacatcagcggtgccggtgaattgttggcctccagcatcagcgactggacaggtatttctatgagcgcaaccgctggcgtgctgttgttcacttttgttgccggtggcgtggtttgtgtcggaactagtctggtcgatttatttaaccgttttctgttcagcgccaagattatttttctggtggtaatgctggtactactgctgccgcatattcacaaagtgaatcttttaaccctgccgttgcaacaggggctggctctgtctgcaatcccggtgatttttacgagctttggttttcacggtagcgtgccgagtattgtcagctatatggatggcaacattcgtaagctacgctgggtgtttataatcggtagtgcgatccccctggtggcatatattttctggcaggtggcgacgcttggcagcattgatagtacaacctttatgggattgctggctaatcatgctggattaaacgggctgttacaggcgttacgcgaaatggtggcctctccgcatgttgagctggcagtgcatttatttgctgatttagccctcgccacgagttttctcggcgttgcgttaggcttatttgattatctggctgatttatttcagcgtagtaataccgttggtggacggttgcaaactggtgcaattacgtttctgccgccgttggcgtttgcactgttttatccacgaggatttgtgatggcgctgggttacgccggtgtggcgctggcggtactggcattgattatccctagcctgttgacctggcaaagcagaaagcacaatcctcaggcgggttaccgggtcaaaggtggtcgtccggcgctggtggtggtgtttctctgtggtattgctgtgattggcgtgcaatttttgattgcggcagggttgttaccagaagtggggtgatcagatagcctcaaattccttattgggtgccagaattaacgctgacacccaatttggcctcttaatgcaggcagcactgcttaaatttcttaccactaccgcacgggcaaggatcgttacgccccggtttctcttctgctttgatcggttgctgaacagctttttcctgcggatgcgccatccagtacgcatgtagatcaagcgccgccagtcgaatggcatctacgctctcttcaaacgcttctgggctcatcttttctacccgctcgaagttttcctcagtaccgtgcagcgcaatcgcctccagcgctggttttaagctatcgggcaacgtactccagtcagaaagtgccacgccccgcatatagccaaagcaccactcctcaacaatcgtcagctcgctgccatcaacttctcgcaagccgaataacggctcaaactgctccgggaattcgttcagacgctctgcggtatcggccatatgttgaaaagccagattcataaagcgcgtcatctctttctcactcgcccagcgcggcacatagtcagccccaccccacacggcaaccagccactgttccggttcaatctcttgcggagaactcaacaccgccgtcaataaaccgtccagctccgccacatcaaggatggcgtggtcagtgttgtatttggtcagaatatcgtccagccattccaactcactttcgtttaacggtcccgttttcatacgcttttccttgtggatctcaactcgccagcacctatcttacatgccggtccgtatcagagatactttttgagtggctttgctggtgattaaaaattaaggagggtgtaacgacaagttgcaggcacaaaaaaaccacccgaaggtggtttcacgacactgcttattgctttgattttattcttatctttcccatggtacccggagcgggacttgaacccgcacagcgcgaacgccgagggattttaaatcccttgtgtctaccgattccaccatccgggctcgggaagaaagtggaggcgcgttccggagtcgaaccggactagacggatttgcaatccgctacataaccgctttgttaacgcgccaaattcttcaggcctttcagccagacatccgcttgacgccgatgtcttttaaactggagcgggaaacgagactcgaactcgcgaccccgaccttggcaaggtcgtgctctaccaactgagctattcccgcattcatcaagcaatcagttaatcacttgattttattatcgtctggcaatcagtgccgccgttcgatgcgttgcattctacttacctggcgcgatgagtcaacgatatttttcaccacttttgatcgtttgctgaaaattacgccgaaacgatcactgatcaagcaaatctgcacgcgcagcgctcaaatattgcaacatactccacagagtcagtaccgcagccacaaagaaaagtgcaataccggcgtactcaacccaaatgttcggacgccacagcagccatgccaacgccaccatctgggcagtggttttcactttcccaatccaggagacggccacgctactgcgtttacccaactccgccatccattcgcgtagcgcagaaataataatttcacgggcgatcatcgttgccgccggtaatgtcacccaccagctgtgataatgctcggttaccagcaccatggcgatagccacgagaactttatctgccacagggtcaaggaaagcaccaaaccgggtactctggttccagcggcgtgccagaaaaccatcgaaccagtcagtcaccgccgcgacgcagaaaatgagcgcggcggcaaacgggctccaggtgacaggcagataaaagaccaatacaaagaatgggataaggatgacacggaacagtgtaagcaacgtagggatattaaattgcataatgacgggtaactatctgttgtcagtaagattacccctatgttgctacagagacatcaatgtttcaagctccagaagatcttttctgccagaccttggctaatacccggcacttttgcaatttcctcgacgctggcgttacgtaaaccttgcaaaccgcccatatatttcaacaacatttgccgacgttttggcccgacgccttcaatggtttccagggaactggtatttttgaccttcgcccgttttttacggtgcccgccaatcgcgtgatcatgactttcatcgcgaatatgctggataacatgcagcgcgggactatctggcggcaaactaaatccctcaccttccggctcaaagaacagcgtttccagtccagccttacgatctgctcctttggcaacgccaagtagcagcggatgatttttatcccaactgacatccagttcggcgaagacatttttcgcctgcgcaagctggcctttgccgccgtcgataaggatcacatccgggatcttactgtcgtcaatggctttaccataacgccgacgcagcacctgattcatcgccgcataatcatcgcccggcgtgatgcctgtaatgttatagcgccgatactccgcacgcagcgggccgttagcatcaaacaccacacaggaagcgacggtttgttcgcccatggtatggctgatgtcaaagcactccatccgcttcacttccggcaatttcaacacgctggcaagcgcggtcagtcgctggtgaacggtagattgctggctaagtttgctggttaaggccgtcgccgcattggtgcgcgcgagtttcagataacgcgccctatcgccgcgaggtttggtttgaacattaatcttgcgtcccgccagttcactaagggaatcggcgagcagcgttttatcgctaagattaaaatcgagcaggatctcacccggtaaggtgcgcatctggctgccttgtaaatagaactggcctacgaaggtttctaccacctcgctcagttccgtaccgccaggcactttcgggaaatagctgcggctgccgagcactttgccctgacgaatgaacaatacgtggacacaagccatgcccgcatcgaacgccacaccaataacgtcgaggtcgtcgccggtattggaaacgaattgtttttcggtgacgcgtcgcaccgcctgaatttggtcgcgaatacgtgcagcttcttcaaactccagattctggctggcagtttccatacgactaatgagttgcgtaagcacctgatcatctttgccagacaaaaacaggcgcacatactcgacctgctgagcgtattcttcttcactcaccagtccttcaacgcacggtcccagacagcgccctatctggtattgcagacacggacggctgcgattgcgataaacactattttcgcactggcgaatggggaaaatcttttgcagtagcgccagtgtttcacgtacggcatagccattcgggaacgggccgaaatattcacctttggcatgcttcgcaccacgatgcatcgccagacgcgggtgggtatcaccactcaggaagataaaaggataacttttatcatcgcgtagcaaaacgttgtaacgcggctgatagagtttgatgtagttgtgttccagcaacagcgcttcggtttctgtgtgagtaaccgttacatcaatttgctggatctgggcgaccagcgcttcggttttgcggctagcgaggttgctacggaaatagctggaaagccgttttttcaggtctttcgctttgccgacatagataaccgtaccaccagcatcgtacatgcgataaacgcctggctggctggttacggtttttaaaaacgcttttgcgtcaaactgatcactcactgactacttaatgtctccgcattacacagaccatggcgaattgccaggtgagtcagctcaacatcgccatgaatgtttagtttactgaacatacgatagcggtagctgttcaccgttttcggactgagattgagctgttcactgatctcattgaccttctggcccttggtgatcatcagcataatctgcaattcacgttcagacaaactggcaaatgggctttctgttttttctggttcgatctggcttaacgccatttgttgagcgatgtcagaagcaatgtaacgctgcccactatagacagaacgaatcgcactcacgacttcctgcggagccgcgcctttgctgaggtagcccgcagcaccggcctgcatgactttcgctggtaaagggttttctgtatggacggtaagcatgatgattttgacatcagctgtggaacgcgcgattttacgcgtcgcctcaagaccgccaatgcccggcatactcatgtccattagcaccacgtcaacggcatttgtccggcaccacttaacggcgtcttcaccgcagcttgcctcaccgacgacttttataccctttatatcttccagaatgcgtcgtatccctgcgcgcaccagttcgtggtcatcaacaagtagaacgttgatcaaaggaatatctccagaaatagggataacgctactgatagttagtcattcgtatattagcggtttttattgcaactttgaaacgttaaaaatggtgggtattcgatttttctctcgtttttgtcaattcgattgtccacagttatggtcacgcccgtcaccaacggcttaccggatcgtttcacagtaagccctacgatgaaatgtgacaaaaattgactttattcagcaaaaatgaaaatcagcccgctgaatatgtaacattaattaacccgaacaatacgggcaaaaaacattcatgataaaaatatttattggtcattatattaacgtattttatagcactgccgatatcacgctcaaaaaacaaccactgctatttttagcaaagcttatggtatactccgccgccttaacatttttcaccgcaaattttcattgcaacatgacgaggaaaataaatgagtacgcctgatttttctactgccgagaataatcaagaactggcaaatgaagtctcctgcctgaaagcgatgctgacgctgatgctgcaggcgatgggacaagctgacgcgggccgcgtgatgttaaagatggaaaaacagcttgcgctgatcgaagacgaaacccaggctgcagtattttccaaaacggttaagcaaattaaacaagcctaccgtcagtaatataaaaccggctgatagcgtgcctttcagccggtttttgcatctggcacgcaggacagaaaagagatcaaattaagccagtagcggccgcgtaacaggcaacctgggtcttatttggtgcattaatttttttctgcatgtttttctggtggaaattgaccgtattctcagagatactcaaaatcatcgctatctctgcacttgttttcccttccgccgtccacctcagaatttctttttcgcgcttgctgaaattcatctctggcgtcatcactatttcatcatttaaacgcatcagagccatcagactttcgcgcaccagtaactgcatttttaattgcagttcatcactaagaatgggtatttcgcgcgcgctgcaacgggaaaaggacaaaaagcccagcgcccggtttggcagcattaaatactgagtgacaccgcggcgtaaaccatgtgcgcgcgcggcttcccataacggctgtgcttcgctgaataagtcatcattccacattaaatggccctgactaaagttttcagggttcagcaccggatcaattgcgagaaagttttttgcctgataataactaacccacgcctcagggtaattggtgtaaaaagccactttaggtcgagtgaatggtaccgggtggcggacacataagctatagtaatcgtactccagctgctgagcctgaagctcaatttcatggtagacctcttctgcggtctccatcctctgaaaacgcaacagcatcgtgcgacgccagctgaaaaaatccttatcctgcatagtaaaccgcaacgcccctgagagtgagtatcatttataatgataattcaaactatcacataaataagatttatatataatttatattattcaggcaatgaattacttttgcaagccatcgcattctcttatgttattaatgagttatgctgatttgttaagcagttttatcaggcttgaaatggcgtccagccccgacaggtgaatcgtcggggctgattttttcttattattgcagcagaaacttctcgaggaactggcgggtgcgaggctgctcggttccgtaacgtttatcatgttatcctaaggattatccgaaaaataatacctacgaacatcttccaggatactcctgcagcgaaatatttgttttaagctcactcacatatcgcaacatttactttactttaagacaattccaggcaaattatacaacactttacgggatagtaagtccgcctgaaaaatcgcgagagtggcgcattaggtgacccatgttgttccgtttagtcatgatgaaatattcaggtaaggggaattatcgttacgcattgagtgagggtatgccatgagtacgattattatggatttatgtagttacacccgactaggtttaaccgggtatctgttgagtagaggggttaaaaaaagagaaatcaacgacattgaaaccgttgatgaccttgccatagcttgtgatagtcagcgccctagtgtggtgtttattaatgaggactgtttcatccacgatgcttctaacagtcagcgtatcaagctcatcattaatcaacatcccaatacgttatttatcgtttttatggcaattgccaatgttcattttgatgaatatctattggtcagaaaaaatttattgatcagttctaaaagcattaaaccggaatctctcgacgatatccttggcgatattctgaaaaaagagacaacgataaccagctttttaaatatgccgacgttaagtttgagccgaaccgaaagcagtatgttgcgaatgtggatggcaggtcagggaaccattcaaatctctgaccaaatgaatatcaaagccaagaccgttagtagccataaaggtaatattaaacgtaagatcaaaacgcataataaacaggttatctaccatgtcgtccgactgacggataatgtgactaatggtatttttgtcaacatgcgctaacacattctgactggtggtttcccaccagtcaggctgaataagattactctgctttctccacaaagataccgtcctgatgccctgcttcattaaagaaccagatgccgagcgggtagtcttccaggctaaccaggtacattgtgccttcactaaactcctcaactgccagtaccacgccaggacgacgcggaccgccatccgttttgactgttacccgatcattcaccttcatcgttttcctcctgtggctttgtgccagtgtagaacaatttcgtttttctggcagcgccaggcgcgcgcgagtgctgattttctcgacggtctatacttaagagatgccaggcggacttaacgactggcggcaacaacagagtaacggttgcgaggaaagatgatgaaaaccgcaaaagagtacagcgataccgcaaaacgtgaggtcagcgtcgatgtcgatgccctgctggcggcgatcaatgaaattagcgaaagcgaagttcatcgcagccagaacgattctgaacacgttagcgtcgatggacgtgaatatcatacatggcgtgaattggcggatgccttcgaactggatattcatgacttcagcgtctctgaagtgaatcgttgaatgcacaataaaaaaatcccgaccctgagggggtcgggatgaaacttgcttaagcaagaagcacttaaaaaattcgttacaccaggaaatctgatgtgttcatcaccttatccgcaatttttttcgctgacaagaaaatattcgccatatgaatgattaacgctacttatgaatagaaatgtgacgcacgtcaccccttggtggctctggcgtcagcgggatcgctcccgaaaaaatcatctttgataatttgtgcggttttgagaatcatcctggtaagaggagtactgcgcgactatgtttagtattcaacaaccactactggtttttagcgatcttgatggcaccctgctggacagtcatagttatgactggcaaccggcagccccctggctcacccgtttacgcgaagcaaatgttcccgtcattctctgtagcagtaaaacaagtgcggaaatgctgtacttgcaaaaaacgttggggctacaaggtttaccgctgattgccgaaaatggcgcagtgatccagcttgctgagcaatggcaggagatagacggttttccacgcatcatcagtggtattagccatggcgaaatcagcctggttttaaatacgctacgcgagaaagaacattttaaattcacgacttttgatgatgtcgacgatgcaaccatcgccgaatggacgggattaagccgtagccaggcggcgctgacgcagcttcatgaggcgagcgtaacgctaatctggcgcgacagtgacgagcgtatggcacaatttaccgctcgtctgaacgaactgggcttacagtttatgcagggtgcgcgcttctggcacgtactggatgcttctgccggaaaagatcaggctgccaactggattatcgcgacctatcaacaattgagtggcaaacgcccaaccacacttggcctgggcgatgggccaaacgatgcgcccttactggaggtaatggattacgcggtgattgtgaaagggctaaatcgtgaaggggtgcatctgcatgatgaggatccggcccgcgtctggcgaacgcagcgtgaaggaccggaaggatggcgtgaagggctggaccattttttctccgcccgttaagcgttatcgctcgcgaatacccgattacgcccagcctgtttagcgagataaagccgacggtcggccagactctggagttgttcaaaatcataatcaccggtttcctcgctgctgcttacccccaggctggcactgatgcgtatcgtcgtactcttggcgatcaacatctctttttcatttaatttcagtcgaatacgttctgcgacctccgcagcctccgtcagactcgcgcctggcagaatcacacaaaactcctcaccaccgacccgcccggcaacgtcctgcgcacgcaaggaactgctaattaatccggcagcatgagaaagaacacggtcgcccgcctgatgaccaaagcggtcattaatcgctttaaaatggtcaagatcgacctgaatgacagaaaaaggatgttggtgcgtctgacacaatttagcgagcggacgggctttttcgaacagtgcgccacggttatataaacgcgttaaggtgtcgtgccacgcctgccactgcaagctgctttgcagaacatacatgttgctaaccatccggcgaatcacataccaggagatgagtaacatggtggtaaagagcgcccacagcagggttaatgcaatgctgatactgccgaaatcgccgcgcacgccttcgcttaacgtatggacacgcaccagcacaccgtcgaaatggtccagacgttcccagctaacatagcgactgtccatacgaatgccgccccgcgtgtcatgttccattgcctgcgccagcaaggccagttcacgaggatcaaaaatattccctgttggatggtcaggattggaagaggtcaaaaatctcagcttactgtcatagagctgatactcaccatcgaggtttttatcgatggcgtttcttaaaaattgctgcatagtacgcacgggaatactcatccccagcacgccataccagtagttattactgtctaccggaacactgacggtaacctgcggttcagtattgctggcgtgttccggttggctagtgaaccagcgtaccgcgcggtgacgattttctcgttgactatggccaataaaccagggttgggtgacatagccgtaataacgcgttggaacattgcgcgtaaacaaggtcggctgcgtgctaacgtaaaatccggcacggctgacatacatcgcctgttcaaccatgctgctggagttgtgcgctagtcgcagcaagtaaccaacttccagtgcagcggtaatttcattgtcgaggctttcattttcgcgagacaggagattcccctcgctgactaatgcatcgctcacaccattaactggcagagtgcgtcgtcggttgagttcgattttccaggcgtgctcgtcgcgatgctgttcgaactcggttacagcatcacgcagagaggtgaaatccagtggcgctacgagagcttcgcgcatgccattacgtaaaaagatcagtttgtcgacgttatactgcaaatgcttatcgagcgcgttggcaacgttttccagatgattacgctggctggagatataggcatcttccagcaccaccacttcacgccaggtgagcaaggtggaaaaaagcaataccacgataaagcagagattaacgacatgaccaggccccaggcggcgtgcgagttttttcaaccagctctggttttccatttttgtctcgtgctgcaccctgacgactcccaacctgcttttttatgattctggcataacctggcgatagcgtaccgcaaaacagcgataattttataatggtggcatgataagacgcgactatcattcattgcaggcattagcacaccaggccggatgtgatccggcctgatgttaatgataccctttcacacttcttccgcagaacgactcccctcccccggaacaagctcggtttcatgaaaagcttcccgcttgaccccgtaaccgtcataccaacgacactcaaccataccgctggagtatccagtgacaatcatccgcgggccgccctctttaaccgtaacttcctcactaaccataaagctcatactcgcctccttttttcgagtgaaacttgttcaccttagttgaagatggcgaattttgcataatagccagtgcgagtattaatgtgcctgaccgcgcattttctctacggctttcactcccagcaccacgatgccgccgatgataaatccaagaatcagatttaaaacagtcggtaatatcatcgccactactgcactttgctgcccggcgaaatgttcaatggcgtgatgcagcggcgcaattccatgtaccacaatcccaccgccgacgaggaacatcgccagcgtgccgacaatgcttaacgctttcatcagccagggcgcgataatcaataaccctttacctaatgcctgcatcagcgcgctggatttttccgccagccaataccccaggtcatcaatcttaacgataacccctaccagaccgtagacgcccacggtcactaccagcgcgatgccactaagcaccagcacctgattaagcaacggcgcttcggccacaatccccagcgtgatggcgacgatttccgcagacaatataaaatcggtacgaatcgccccttttattttgtccttttcaaacttcagcggatcctgcgccgccagcttctccagacgctgctggctctgcgccggatcttctttatgtttacgcgcctccagcatatgcagcactttctctactccttcaaagcagagaaacgcgccaccaatcatcaacagaggcgtaatcgcccacgggataaacgcactgatgatcagcgccagcggcaccagaatcactttattaatcaggcttcctttcgccacgccccagaccacgggaagttcccggttggcccgcacgccactaacttgttgcgcattgaggcttaagtcatcccctaatacaccggcggttttcttcgccgccagtttgcccatcacggagatatcgtccagtagtgtggcgatatcatcgagcaacgtcagtaaactactcccggccaaaagcattccctctcatttttattgttgaagggtgtaagtatgaagcaaaaacggcagctctgatacttgcttcacaggtcaacatttttttaacaatcaagtgcaattatatctctcgccagcagaatgattttcacgtttactatgaaccacctttttatttccaccgtgagggattatgcgtttccgccagttgttaccgctttttggcgcgctgtttgcgttgtatatcatttggggcagtacctattttgtcattcggattggcgtggaaagctggcctccgttaatgatggcgggcgttcgattcctggcagccggtattttattgctggcatttttgctactgcgcggacacaaactccccccgctacgtccgctgctcaatgccgcgctgattggcctgttattgctggctgtcggtaatggcatggtgacggttgccgaacatcaaaatgttccttccggcatcgccgccgtagtggttgcaaccgtgcccctctttaccctgtgcttcagccgcctgtttggcattaaaacgcgcaaactggaatgggtgggtattgccattgggcttgccggaatcatcatgctcaatagcggtggaaatttaagcggcaatccgtggggcgcgattctgattttaatcggcagcattagctgggcgtttggcagtgtttatggcagccgcattaccttacctgtagggatgatggcgggtgcgattgagatgctggcggcaggcgtggtgttaatgatcgcgagcatgattgcgggtgaaaaactgacggcgctcccttcccttagtggcttccttgcggtcggctatctggcgctgtttggtagcattatcgccatcaacgcttatatgtatttaatccgtaatgtcagtccggctctcgccaccagctacgcttacgttaacccggtggtcgcggtcttgctgggtacgggactgggtggagaaacactgagcaagattgaatggctggcgctcggcgtaattgtcttcgcggtggtactggtcacgttgggaaaatatctcttcccggcaaaacccgtagttgcgccagttattcaggacgcaagtagcgagtaatcaagcgagtaaatgaatcccctgcgtgtcgatctgcgcgctggcaccttcgccgcagatccactcttccagacgctcggtaagcgcttcatccgtcagcttctcgcgcccacgtaacgcgcactcccagacaatcaatacgcgccagccgagttcctgcaagcgactgatatcgcggcgatcgcgctcaacatttttacctatcttctccagccagaactcggttcgagtcgcaggcactttaaacagatagcagtgatgatgatgccagaagcagccatgggtaaatatcacgcagcgatattcatcaacgacaaaatccggacgtccgggcagactggcgtcctgaacgcgaaatgccaggccctgcccggttaacagactggcgaggcgcttctctatcgccgtatcacgcgtggcaatcgcgcgcatatttttgctgcgagtggccttatcgtgaacgtcggccatgttgtgcctcttgctgacgcttagttatcgactacgtcggccatgttgtgcctcttgctgacgcaacgccaccgcctgtttgatttttggctcaagcagttttgccaccgcggcaaagaccggcacgaccacgctgttaccgaactggcgataggcctgagtgtcgctaaccggaatacggaatttcgcttctcccggcgcttcaaaacccattaagcgcgcgcattcccgaggcgttaaccgacgtggacgatgttgctgattcagcggatcgtcaaagtctttctcacccgtggccatatcccagccgcgatcgattaaaatttccgcgccatctttgtaataacgcgcagacagcgtacgcgtgacgctttgcggattgttcggataaaccattccataaccgaagccgttaccgcgcgcctgatgttttttcgcatatcgatagaggtacttccacagcaccggcgtcaggatatatttcgcctcgaccatcgggtccaacagctgcgccagcgtcactcgctgcgcagggaaacattcgctgatatcacgcagggtaaaatcggctttcagattcagatcgcgacgaaaacccaccagcacgatgcgttcacggtgctgcggcagaaaatgtttgccgtcgatgattttcggatcgtctggcccattatcttctgcatcagccacgtcatagcccagttcgtccagcgtctgcatgatgatgcggaacgttttaccctggtcgtgacttttcaggtttttgacgttttcgagcacaaacatcgccggacgacgcgcgtcgataatgcgtaccacatcaaaaaacagcgtgccctgggtatcgcaggcaaaaccgtgcgcccgcccgaggctgttctttttgcttacgccagccaggctaaatggctgacaagggaaaccggccagtaaaacatcgtgttcaggaatgtgttgacgaatatgttccgccgccgcctcatcactcacgccttctttatggctgagggtgatgtcgcggatatcttcattaaaatgatgcgtcgccggatcgcaataatggttggctttataagtgcgtaccgcatgtttgttccattcgctggtaaacacgcactgtccgccaatgctttcaaaaccgcgacggatgccgccaattccggcgaatagatcgataaagcgaaacgcataatgcggatgatgtgccggtggtttgggtaataacgtttgcagatgggcgaactctttctcacttaaacggtgccatgcgctgtcattcgccagcgcacgttttaaaattgccgcgctccagtgattctcacctacaccattaagctgcgccaccaacgttttaacatcataaatttgcagcagtttctccagcattgcctgtgcggcattcccggtgctgtaactatcggttacacttatattttcctgcatagatttcaccggccatctgagatggccgacaggttaacataattacagccatttagggccacgcgctcagccagcggaactaaacgcatctatcaccttgtgatcgacaccttcattctcccccgccagttcggcactgagcttcgccataaactcgactaaaaaatgcgcgttgtgctgcgccagctgcttgcctcttgcggtttgcatggtttgcggtagcttcagcaacttagtctggaaatgatccagcgcgtagcgtttatcatcaagcgggcgatgctgtgcgaacggatcttcaccatcaaacagcgccacgcccaatgccccactaacggcaaacacgcgcgccaggccaatcgcccccagggcttccagccgatccgcatcctggacaattttagcttccgttgttaagggggcgatttgcgcgctgaaactgtgagcggcaatggcatgacaaacggcctcgattttctccgccggaaattgctcgaactcttcacggagcaggcgacgcgtctcttctgccgccaggatactagaacgctgcctttgcggatgatttttcgccaggctcacaatatcgtgaaaataacaggcggttaaaatcaccagcatatcgacatcgtcatctgccgccagcttctgtgccgtagcccagacgcggcgaaaatgacacacgtcatgggccgcgtcctggtgctgatgatggtttttcaaccagttttcgaactgtgcctgccagtgttgtaagtccatacgcgctccgttgccaaagagtcgccaccttagcagtttttattcatagcgtctgctacgtgcgggacgaggtcgggtgtaccaggcaatgctgcctaacaatgccccgaccagagccataaataaaaatccgaccagtgcccctaaccactttcccgcggtagagcctaaatcgctttcaaatccgctcacgggggcatcgggaatccggctcatcacccagatgtaacgcgccattgcccagacgaaatagccacaccatgtatagaaagcccacaaagccagtttgccgccagggctgcgagagagtctctcttccatctttgtgctaccgtattccattttgagataacccggaaaattcagacttagtactattatgtgataaaagtcacatttttccacattggatgagccagtcaagactcaatcattttttgaacaaatagataaattttgcgcaacggcagtgaatacaggaaaaatcgttttgagcgattttatttatctttgatatcggctttattaattcatttaatcaatatattagcactgattacaattatacctttttattattctgtgtcatgatgcttccgttattagccttttatcgtcttgtttatattttttgggccggcatgatgccggcttttttttatgccttcattaatgtgcgcctgatcacaccagccgtttggcgcaacaatcattgataccccctatgtttccgctcaactcataacatattgatatacatttataattttcatgaatatttatatttagaattcataattatgaattatattaaatagattagaaacattttgatatcttttaaatacatttgttacatgtaatccttaaaataaaatgaacttcatagaatagtatccaaatgtgcttttttttggataacggcacttattgatatattcatgaagattataatcacaagggaatacataatgaaaagaaaagttctggcaatgctggtcccggcgttattagttgctggcgcagcaaatgcggctgaagtctataataaagatggtaataaactggatttgtacggaaaagtagtgggtctgcactacttctctgatgattctggcagcgatggcgacatgtcatatgcccgtatcggtttcaaaggtgaaactcagatcgctgatcaattcactggttatggtcagtgggaatttaacattggcgcaaacggtcctgaaagcgacaagggtaataccgcaacgcgtctggcatttgcaggtttaggctttggtcagaatggtactttcgactatggtcgtaactacggtgtcgtatatgacgtagaagcatggaccgatatgctgccagaatttggtggcgatacctatgctggcgctgacaacttcatgaacggtcgtgctaatggtgttgcaacctaccgtaacaatggcttctttggttaggtcgatggcttgaactttgctttgcaatatcagggtaataatgaaagtggtggaccattcgggcaggaaggttccggtagtggtgatggccgtagcctttccaaagaaaatggtgatggtttcggtatgtcaacatcctacgacttcgacttcggtttaagtctgggtgctgcatatcaaactctgatcgttcagatcgtcaggttggagttggtttaaatgatcgtaaccatagcaacagaaatgctggtggtgaaaccgctgaagcatggactgttggtgcaaaatatgatgctaataatgtgtatttagcagctatgtacgctgaaactcgcaatatgaccccatatggtggtggcgagtttgataatggtgaatcaagatcagccatcgctaacaaaacccaaaactttgaagttgttgctcagtatcagttcgactttggcctgcgcccgtccatcgcttacctgcaatctaaaggtaaggatttaggcggttgggctcatgacggcaacggcgacccacgttacaccaataaagatctggttaaatacgttgatattggtgcgacctactacttcaacaaaaacatgtccacctatgttgattacaaaatcaacctgctggacaacgacgatgacttctacgaagcaaacggcatcgctaccgatgatatcgttgctgtgggcttagtctaccagttctaatcagtcaactcgctgcggcgtgttactgtaaaactgaacactagcctgagttcgtccctcatcgaactcaggcttttttattggcatttcatctccatctgcggcacacgcaattgccgaagcatatcgatacagcaccttaccctgcccctcctggcacaataacatcaaccagctactcttcaagctaacacccaaatgcatttctttatgaattaatccgtaacaaacacgcttcccatatagaaatatttgcaaaaatagtgcatgaaataagctttttctctaccaatccgggatataaatattcatcagcaccacaatattccacagcactaaatctctccccgccaccccgtacctctgataatggtctaaaatcattgaagccacttgcgacgacgttgctcaataaggaaaatttggcgtgaataatattcaacaccagtgcagcatcatcattacatacttacagccgccgactaccgctttcgatatattgactcaattttccagcctggttaaaaatagcgaccagctcagtcgcaaatatagtgactaccctaactaagcaacaataaggaatacactatgactgttcaaacaagtaaaaatccgcaggtcgatattgctgaagataatgcattcttccctagtgaatatagccttagccaatataccagtcctgtctctgatcttgatggcgtggactatccaaaaccttatcgcggtaaacataaaattctggtgatcgccgcggacgaacgttatttgccgaccgataacggaaaactgttcagcaccggtaaccatccgattgaaacgttgctgccgttgtatcatctccatgctgcaggtttcgaattcgaagtggcgaccatttccggtctgatgaccaagtttgaatactgggctatgccgcacaaagatgaaaaagtaatgccattctttgagcagcataaaagcttgttccgcaatccgaagaaactcgcggatgttgttgccagcctcaacgctgatagcgaatatgcagcaatctttgttcctggtggtcatggcgcacttattggtttacctgaaagccaggacgtggctgccgctttacagtgggcaatcaaaaatgaccgttttgttatctccctttgccacggcccggcggcttttctggcgcttcgccacggcgataacccactgaatggttattccatttgcgcattcccagacgccgcagacaaacaaacgccagagattggctatatgccgggtcatctcacctggtacttcggcgaagaactgaagaaaatgggcatgaatatcattaatgacgacatcaccgggcgagtacataaggaccgtaaacttctcaccggcgacagtccttttgcagcgaatgcgttgggtaaactggcggcgcaggaaatgctggcagcttacgcgggttaatccctgttacgtttgaatgtaagcgcataatcaatcgcggccgcgttagtactcacgacgtggctgcgttttttcacggttaatttatggcgtactgaagccctatgttaatttctttgcggtaacgtaatccggaacacattatgcttattgagatagtgatacgtagcacttcccccatgcaattcggcaatcgctttgactaaagaaaggcctagtccctgacctacggaatgacggctattatctccccgccaaaatctacggaagagtttttcaggctcattaattttcgttccagggctggcgatatcaatattaagatagctgttggtatcaagaaaactggttatatgaatacggcttttttctgggctatatctaatggcattaacaataagattgcttaacattcgttgtagtaaaattttatccgcaaagatttgctgattgcactcgaccttaaagcaaatctctttctcgtcactaaggtattcaagatagtccaacaaattttcgacttccttattgagagaaaggctgtccagtttcaccaaaacattgtttttatctgccctggcaagaaacagtatgttctctgttaaccggctaatattttccagctcttcaatgtttccggcaattgttttttgatattcagcgatacttctggtttgactgagcgtaacctgattctgacccagtaatgcattaattggcgttctaagttcatgagcgagatcgtcagcaaactgacttagacgctcaaaatctttgactaaagcatgatgcattttattcaacgcctgcccaagaggttttagttctctcggtaatgcgctaacctcaacaggctctcggctatcgttataattcagcgcttccgttacaccactcaactttttgatctctcgtaatcccgttctgattaacagcggacttaatacactgcaaagtacaatggcgacaatgcaaattataatgctattaattttatactgttcaagcatgttatgtctggcactagccaatttagccacagtaaccgttaaacttgggctaacttcatcaatattaattcgtaaagcatctatctctgtatcattaataatgcttctgtaaatgccagctgcgctgattgtctcactagcaggtatgttatttaacatgccatcactgacatttgtccggttaacaattttattgatgctatcaccatgaataatcaagatatcctgactaacatccatcatccggttaaagtacacaggtaacgtatctggatttaccccatcaattaacaactgcttgatctgcgctgtccggttaatgagtgttgtatcatcgcgccatttcaactcacttgccaggccattatagagagtccagacaattccggcgccagcaacagacagtagcaatataaaaagcaaggttaaacggacggttatagatagtcttttcattatttttttaccgctacgaaactatagcccatcccccggattgtggcaattagcttttcaggaaaaggatcatcaacttttgcgcggagcctgcgaatggcgacgtccaccgtattggtatcactatcaaagttgattccccaaatttcactcgcaataaccgttctgggtataatttcgccagctctggaggccagtagccaaagtaactgaaactccttgcgcgtcagtgtaatactgatattgtccctgctcacactatgactaacagagtccattcttaagccgctgatttctaatgtactattcaaagcgtgatgttgccttaattgtgcccgaacccttgccagcaactcagaaaaactaaaaggttttaccagataatcatttgccccactgtccagccctctgactctgtcatcgacagaatcccttgcagtaaggcaaataacaggggtttgctttgctgttcttaacgtttgtaagatctgccagccatccatacccggaagcataatatccagaatgatcaatgcataatcatccttcagcgcaagataaagcccatctctgccatcagaaacggcatcgatgacataacccgcttcggaaagcccctgcgttacccattcctgggtcctttgattatcttcaataagtagaatcttcatgaaaataatatgccataaatcatatgttatagaaacagcctggttcattacaaaattgtaatgctgctgtaaggttaccctggacgctttttcgctatcctcaaaactcattcacatgacaaggatataaacatgttaaagcgttatttagtactcagcgtagcaacggcagcatttagtttaccttctttggttaatgccgcacaacaaaacattcttagcgtgcacattttgaaccagcaaacaggaaaacccgctgctgacgtgacagtcactcttgaaaagaaggcggataacggctggttacaacttaataccgccaaaacagataaggatggacgaattaaggcactgtggcccgagcaaactgcaactacgggcgattaccgtgtcgtatttaaaaccggggactatttcaagaaacaaaatcttgaaagtttcttccctgagatccccgttgaatttcatattaataaagtgaacgagcattatcatgtgcctttattacttagccaatatgggtatagtacctatcgtggcagttaatgcataaatatgtaaaagcagatctctgctactgttagggaggacactccctgacagattaacagtaaacggctcttgctggctaacgacaaaaaagtgtgatggcttatgaaaaagaatcaatttttaaaagaaagtgatgttacggccgagagcgtattctttatgaagcgtcggcaggtgttaaaagcactgggcatcagtgcaactgcactttctttgcctcacgctgcgcatgccgatctgcttagctggtttaaagggaacgatcgcccgcccgcccccgccggaaaagcgctggagttcagcaagcctgccgcctggcaaaataacctgccactgacgccagcagataaagtttccggttataataacttctatgaattcgggctggataaagccgatcccgccgctaatgctggtagcctgaaaaccgatccatggacactgaaaatcagcggcgaagtggcaaaaccattgaccctcgatcatgatgacttaacccgtcgcttcccgctggaagagcgtatttatcgtatgcgctgcgtggaagcgtggagcatggtggtgccgtggattggttttccgctgcacaaattgctggcgcttgccgaacctaccagcaatgcgaagtatgtcgctttcgaaacaatttatgcaccggaacagatgccaggccagcaggaccgctttatcggcggtgggctgaaatatccttatgtcgaaggattgcgtctcgacgaagcaatgcatccgctcacactgatgaccgtaggtgtttatggcaaggcgttaccgccacaaaatggcgcgccggtgcgactgattgtgccgtggaaatatggctttaaagggattaaaagcatagtcagtattaagctgacccgcgagcgtccgccaaccacctggaatctggcagcgcctgacgaatacggtttttacgccaacgttaatccgtatgttgatcacccgcgctggagtcaggctaccgaacgatttattggtagtggcggcatcctcgatgtacagcgccagccaacgctactgtttaatggttacgccgcccaggtggcaagcctgtatcgtggcctggatttgcgggagaatttctaaatgcgtctgacagcaaaacaggtgacatggctgaaagtttgcctgcatcttgccggattgttgccgtttctctggctggtctgggcgatcaatcacggtggactgggtgccgatccggtgaaagatattcagcattttactggtcgcactgcactgaaatttttgctggcgaccttgttaatcacccctctggcacgctacgcaaaacagccgttattgatacgcactcgccgcctgttaggattatggtgctttgcctgggcgacactgcatttaacaagttacgcattgctggagctgggcgtgaataatctggcgttattaggtaaggagttaattacccggccttatttaacgttaggtattatcagctgggtaattttgcttgctttagcgttcactagtacccaggcgatgcagcgaaaactcggcaagcactggcaacagttgcataatttcgtctatcttgtcgcgattctggccccaatacattatctgtggtccgtgaagattattagtccgcagccgctcatctacgctgggctggctgtactgcttttagccttacggtataagaagttgcgttccctttttaaccggttacgcaagcaggttcacaacaaattatctgtataacttcatattgccgacaaagtacgcgttatccctgccggatgtggcgcgagcgccctatccggcatacacagatcgcatcaggttatgtttcgtttgtcatcaacctcaaatcaccaaaataatttattttatttcaataagatagataagtagaactgagaaagccatgctctcgtttcctaagagttgttgcattttgctatatgttacaatataacattacacatcatatacattaactctggaggaaactgttttggcgattcgtctttacaaactggctgttgctttaggtgtctttattgttagcgctcctgcctttagccatggtcatcacagtcacggcaaacccttaacagaggtcgaacaaaaagctgctaatggtgtttttgatgatgccaatgtacaaaaccgaacgctcagtgactgggatggagtctggcaatccgtttatcctttactgcaaagtggcaaacttgaccccgtctttcagaagaaagcggatgcagataaaactaaaacatttgctgaaattaaagattattatcacaaaggttatgcaacagatatcgagatgattggcattgaggacggcattgttgaattccatagaaataatgaaacaacaagctgtaaatatgattacgatggatacaaaatactcacctataaaagtggcaagaaaggcgttcgttacttattcgaatgtaaagatcctgaaagcaaagcccctaaatatatacaatttagcgatcatataattgcaccacgaaaaagttctcattttcacatttttatgggtaatgatagtcagcaatctttattaaatgaaatggaaaactggccaacgtattatccatatcagttgagtagcgaagaagtggtcgaggaaatgatgtctcattgagtattctcatgataacgcctcgatgccgctttagtaagttatcataactgccactggtccatccacaaacgccactgaacgcaagctagctacagacacgctcatcactatgacgtgtctgtatattaataagctaacccgcattgagttaaccaataacggattccatacacaatacggccaacagagaaagatacctgtgctcacgccattgcttatattggctggttacaatatgcactatcaattttttaaataacaaattattaaaaccacatctgtataaggaatttttaaggttcgtgggatagcttgactgtgaaaatcacaggagctacaaaaatgaaccgattcagtaaaactcaaatttatttacattggataacgctgcttttcgttgcaataacctatgccgcgatggaactccgtggctggtttcctaaaggtagtagtacttatctgctgatgcgagaaacacattacaatgcgggtatattcgtttgggtgttaatgtttagtcgcctgattataaaacaccgttatagtgatccttctattgtgccaccgccacctgcctggcaaatgaaagcggctagcctaatgcacatcatgctttatataaccttccttgcacttcctctgctggggattgctttgatggcttacagtggaaaaagctggagtttccttggtttcaatgtgtctccctttgttaccccaaacagcgaaattaaagcactgataaaaaatattcacgaaacctgggcaaatataggctactttttaatcgcagctcacgctggcgcagcactctttcatcactacattcagaaagataatactctgttacgaatgatgcctcgccgcaaataagtcgatccccttacaaggaaatgtgaaccatggacatcaacgcgtcataaatgtttacgcaagtgcacaatgcaccctttccactatcaacaaggaggagcagaaactgtgtaaatcgtacaatggtaagacttatcaaaaatacaggttaattttggtatttaaaccttttttacttgttagtatgatacaaaggctttcaaaaaagctgcgaaattcaacaactcttggaaattatggactttgtcccgcggctttaatctgacggccgcgttccttttttgactcaattattgaacccttctctacgcaacttcagttcccaccaccaactttgcggcagtttcataggatgaatgtctaaaagaataatggtgagcgataagaaaacgactgaataactgcacattttcgctcgaaagcttcctgtcagatccatagcgaatcaagtgctgaatgtcacagtatcgaacagaaaacagtgacgatctaacccttcaagaatattctacgattgttctgtttaggaaaagcaaggcgggaagtcgggagataagtcattgataaagtggcggagagagggggatttgaacccccggtagagttgcccctactccggttttcgagaccggtccgttcagccgctccggcatctctccgttcagatggttgccatgatgccaggaaatttggcattttaacagtccctgtccgtgcaattttgttcaagtgacgagtttgcgagcaaaacgatgattaagtggccctggaaagtacaagaaagtgcacatcaaactgcccttccctggcaggaagcactaagcatcccccttttaacgtgtctgacggaacaggaacaaagcaaattagtcactcttgccgaacgttttttacagcaaaagcggcttgttcctttacagggctttgaactggatagtttaagaagctgccggatagcacttctattttgcctacccgttctggagttaggactggaatggctggatggttttcatgaagtcttaatttatcctgcgccatttgtggtcgatgatgaatgggaagacgatatcggtctggtgcataaccaacgtattgttcagagtggtcagagctggcagcaagggcctatcgttttgaactggttggatatacaagattcttttgatgcttctggttttaacctgattattcatgaagtcgctcataagctggacacccgtaacggcgatcgcgccagcggagttccctttattccgttgcgtgaggttgctggctgggaacacgatcttcatgctgcaatgaacaacattcaggaagaaatcgaattggttggcgagaatgcggcgagcattgatgcttatgcagccagcgatcctgctgaatgttttgccgtactttctgaatatttctttagcgccccagaactttttgctcctcgtttccctagtttgtggcaacgtttctgccaattttatcaacaagatcctttgcagagactgcatcacgctaatgatacagacagctttagcgcgacgaatgttcattaattaacaactttgcagattaattaaccaattgaaatgacttatgaaatttagtgttgacagacaaggtaccgctaagtaatattcgccccgttcacacgattcctctgtagttcagtcggtagaacggcggactgttaatccgtatgtcactggttcgagtccagtcagaggagccaaattctaaaaattcgcttttttagcgcaatgtcactgaccttagttgaacattgttttttaacggatagcgggtttttaacatcttaagcgccctcgacctttatggttgagggcgttttgctatgaacgccatcaccattttcccctcgattataaaacttgagttattcagtagtctcccctcttgcaactcacacccaaaactgcctaacgaaaagttattaattttcaatcatattgctatcagtatttacattttttcgctgtgctagaaagggcgcatttatgttagctcgtagtgggaaggtaagcatggctacgaagaagagaagtggagaagaaataaatgaccgacaaatattatgcgggatgggaattaaactacgccgcttaactgcgggtatctgtctgataactcaacttgcgttccctatggctgcggcagcacaaggtgtggtaaacgccgcaacccaacaaccagttcctgcacaaattgccattgcaaatgccaatacggtgccctacacccttggagcgttggaaagcgcccaaagcgttgccgaacgtttcggtattagcgtggctgagttacgcaaactcaaccagtttcgtacgtttgctcgaggttttgataatgtccgccagggtgatgaactggatgtcccggcacaagttagtgaaaaaaaattaaccccgccgccgggtaatagcagtgacaacctcgagcaacagatagccagtactagtcagcaaatcgggtctctgctcgccgaagatatgaacagcgagcaagcggcaaatatggcgcgtggatgggcctcttctcaggctagtggcgcaatgacagactggttaagccgcttcggtaccgcaagaatcacgctgggcgtggatgaagattttagcctgaagaactcccagttcgattttctccatccgtggtatgaaacgcctgataatctctttttcagtcagcatactctccatcgtactgacgagcgtacgcagattaacaacggcttaggttggcgtcatttcactcccacatggatgagcggcatcaacttctttttcgaccacgatcttagccgttaccactcccgcgccggcattggcgcggagtactggcgcgactatctaaaattaagcagtaacggctatttgcgactgaccaactggcgcagcgcacctgaactggacaacgattatgaagcacgcccggccaatggctgggatgtacgcgcagaaagctggctacccgcctggccgcaccttggcggtaaactggtctatgaacagtattatggcgatgaagtggccctgttcgataaagacgatcggcaaagtaatcctcatgccataaccgctggacttaactatacccccttcccgctgatgaccttcagcgcggagcaacgccagggtaaacagggcgaaaatgacacccgttttgccgtcgattttacctggcaacctggcagcgcaatgcagaaacagcttgacccgaatgaagtcgctgcacggcgtagccttgcaggcagccgttatgatctggtggatcgcaacaacaatatcgttctggaatatcgcaaaaaagaactggttcgcctgaccctgacagaccccgtgacagggaagagtggagaagtgaaaagtctggttagcagcctacaaaccaaatatgccctgaaaggctataacgtcgaagccaccgcactggaagctgccggtggcaaagtggtcacaacgggtaaagatattctggttaccctgccggcttaccggttcaccagtacgccagaaaccgataacacctggccgattgaagtcaccgccgaagatgtcaaaggcaatttgagcaatcgtgaacagagcatggtggtcgttcaggcacctacgctaagccagaaagattccagcgtaagcttaagtacccaaacattgaacgcggattcccatagtaccgccacactgacttttattgcgcatgatgcagcaggtaatcctgttgtcgggctggtgctcagcacgcgtcacgaaggtgttcaggacatcaccctttctgactggaaagataatggtgacggaagctatacccagatcctgaccacaggagcgatgtctggcacgctgacgctgatgccacagctgaatggtgtggatgcggctaaagcccccgccgtggtgaatatcatttctgttagcagttcccgaactcacagcagtattaagattgataaggaccgttatctctccggcaatcctatcgaggtgacggtagaactgagagatgaaaatgacaaacctgttaaggaacaaaaacagcaactgaataacgcagtcagcatcgacaacgtgaaaccaggagtcactacagactggaaagaaaccgcagatggcgtctataaggcgacctataccgcctataccaaaggcagtggacttactgcgaagctattaatgcaaaactggaatgaagatttgcataccgctggatttatcatcgacgccaacccgcagagtgcgaaaattgcgacattatctgccagcaataatggtgtgctcgccaatgagaatgcagcaaacaccgtcagcgtcaatgtcgctgatgaaggaagcaacccaatcaatgatcataccgtcacgtttgcggtattaagcggaagcgcaacttccttcaacaatcaaaacaccgcaaaaacggatgttaatggtctggcgacttttgatctgaaaagtagtaagcaggaagacaacacggttgaagtcacccttgaaaatggcgtgaaacaaacgttaatcgtcagttttgtcggcgacagcagtactgcgcaggttgatctgcagaagagcaaaaatgaagtggttgctgacggcaatgacagcgtcacaatgaccgcgaccgtccgggatgcaaaaggcaacctgctcaatgacgtcatggtcactttcaatgttaatagtgcagaggcgaaactgagccaaaccgaagtgaatagccacgacgggatcgccacagctacgctgaccagtttgaaaaatggtgattatagggttacggcctctgtgagctctggttcccaggctaatcaacaggtgaattttatcggtgatcaaagtactgctgccctgaccctcagtgtgcctagtggtgatatcaccgtcaccaacacagctccgcaatatatgactgcaaccttgcaggataaaaatggcaacccactaaaagataaagaaatcaccttctctgtgccaaacgacgtcgcaagtaagttcagcattagcaacggaggaaaaggcatgacggatagtaacggggttgcaatcgcctccctgaccggcacgttagcgggcacgcatatgatcatggctcgtctggctaacagcaatgtcagcgatgcacagccaatgacgtttgtggcggataaagacagagcggttgtcgttttgcaaacaagcaaagcggaaatcattgggaatggcgtggatgagacaactctgacagcaacagtgaaagatccgagcaatcatccggtggcggggataacggtaaacttcaccatgccacaggacgttgcggcaaactttacccttgaaaataacggtattgccatcactcaggccaatggggaagcgcatgtcacgctgaaaggtaaaaaagcgggcacgcatacggttaccgcaacgctgggtaataacaataccagtgatagccagccggtaacatttgtggcggacaaagccagcgctcaggttgtcctgcagataagtaaagatgagatcacaggtaatggcgtcgatagcgcaacgctaactgcaacggttaaagatcagttcgacaatgaggtgaataatcttccggtaacattcagcagtgcctctagtggactcaccctgaccccgggagtaagtaataccaacgagtctggcatcgcgcaggccactctcgcaggcgttgcctttggtgagaagacggttactgcaagtctggctaataatggtgccagcgacaacaaaactgtgcattttattggcgacacagcggcggcaaaaattatcgagttggcgcctgtcccagacagcataatcgccggtaccccgcagaacagctccggcagcgtcatcaccgccacagtcgttgataataatggctttccggtgaaaggtgtgactgtgaacttcaccagcaacgcagcgacagccgaaatgacgaacggcggtcaagccgtgacgaacgaacagggtaaggctaccgtcacttataccaatacccgctccagcatagaaagtggagcgagaccggataccgttgaggccagtctggaaaatggtagctccacgcttagcacaagtattaatgtcaacgctgatgcgtctacggcacatctcaccttgctacaggcactttttgatacagtctccgcaggcgagacaaccagtctgtatattgaggtgaaggataattacggcaacggtgtcccccagcaggaggtaaccctcagcgttagtccaagtgaaggcgtgacccccagtaataacgctatatatactaccaaccacgacggcaatttttacgcaagctttaccgctacaaaagccggggtttatcaattgacggcaaccctcgaaaatggcgatagcatgcaacaaacagtgacctatgtgccgaacgtcgcgaatgctgaaatcacgctggcagccagcaaggatccggtgattgccgacaataacgatctcacgacactaacagcaacagtcgctgatacagagggcaatgcgatagccaacactgaggtaacatttactctgccggaagatgtgaaggcgaacttcacgctgagcgatggcggtaaagtgattactgatgctgaaggcaaagcgaaagtcacgctgaaaggtacaaaagcaggcgctcatactgttacagcaagcatgactggcggtaagagtgagcagttggtggtgaactttattgcggatacgctcactgcgcaggttaatcttaacgttaccgaggacaattttatcgctaataacgtcgggatgaccaggctgcaggcaacagtgactgatggaaacggcaacccgttagccaatgaggcggtgacattcacgctaccggcagatgtgagcgcaagctttactctcggacaaggcggttccgccattactgatatcaacggcaaggctgaagttacactgagcggtacaaaatccggcacctaccccgtgacagttagcgtgaacaattatggtgtcagtgatacgaaacaggtgactttgattgccgatgctggtaccgcaaaactagcctccttaacctctgtatacagtttcgtcgtcagcacgaccgagggcgcaaccatgacggcaagcgtcactgacgctaacggcaacccggtagaaggcataaaagttaatttccgcggaacctccgtcacgctaagcagcaccagcgttgaaacggatgatcggggtttcgctgaaattcttgtgacaagcaccgaggtcggactgaaaacagttagtgcctctctggcagataaacctactgaagtcatcagccgattactgaatgccagtgcagatgttaattctgcgacgattaccagtctggagataccggaaggtcaggtaatggtcgcacaagacgtagcagttaaagctcacgttaacgaccagtttggcaacccggttgcgcatcaacccgtgacattcagtgcagagccatccagccaaatgatcatcagccagaatacggtctctactaatacgcagggtgtagccgaggtcaccatgacgcccgaaagaaacggtagctatatggtgaaagcatccctgccgaatggagccagtcttgagaaacaactggaggctattgatgaaaaactgacactcacggcgtccagtccgcttatcggtgtctatgcccctacaggcgctactctgacggcaacgctaacctctgcaaatggcactccagtggagggtcaggtcatcaactttagcgtaacgccagaaggggcgacgttaagtggcggaaaagtgagaactaactctagtggtcaggctccagtcgttttgaccagcaataaagtcggtacatatacggtgactgcatctttccataacggcgtaacaatacagacacagacaaccgtgaaagtcactggcaacagtagcaccgcccatgttgctagctttatcgctgatccaagcactatcgccgccaccaacactgatttaagtaccttaaaggcaacggttgaggatggcagtggtaacctgatcgaaggtctcactgtgtacttcgccttaaaaagcggctctgccacattaacgagtttaacagcggtgaccgatcaaaacggaatcgcgacaacaagcgtgaaaggagcgatgacaggtagcgtcacggtaagcgcagtcacgaccgctggtggaatgcaaacagtagatataacgctggtggctggcccggcagacaccagccagtccgtccttaagagcaatcggagtagtctgaaaggggactataccgatagtgctgaattacgtcttgttctgcacgatataagtggcaatccgatcaaagtttctgaagggatggaatttgtgcaaagtggtactaacgtgccctatataaaaattagcgcaattgattacagtctaaatatcaacggtgattacaaagccactgttacaggaggcggagagggtatcgcaacgctgatccctgtattgaatggtgttcatcaagctggtctgagtaccacaatacaattcactcgcgcagaagacaaaataatgagcggtacagtaagtgtcaatggtactgacctaccgacaactacattccctagccaggggttcaccggggcgtattatcagttgaataatgacaactttgccccaggaaaaacggcggctgattatgagtttagtagctctgcctcctgggtcgatgttgatgctaccggtaaagtgacatttaaaaatgtcggcagcaatagcgaaaggattacggcgacgccaaaaagtggaggccctagctatgtatacgaaatccgtgtgaagagttggtgggtgaacgccggcgaggctttcatgatatacagccttgctgaaaatttttgcagcagcaatggctacacgctccccagagcaaactatttaaaccactgtagttcccgaggcatcgggagtctgtacagtgaatggggagatatggggcattacacgactgacgctggttttcaaagtaatatgtattggagttctagtcccgcaaacagtagcgaacaatacgtagtttccctggcaacaggtgatcaaagcgtatttgaaaagcttgggtttgcttatgcgacatgttataaaaacctgtgattttccgttataatttcttaaagagtgttccattcggggcactcttttttacattccctctacagaactagcccttctctcacagaaaatgaataaataaaaatgcggcaccgccagaatcgcgttcgatgtgactatgatcattttcggtgagtactgctttgatctaaaggctggttttctgtgatgattgaccagcctcagagtattgatgacaccaccgttcataacagatcggcattactatgcataagtactgtctcatattctcgccaaaacactttttaatgcctttgcgaattcatccagacttatattgtcaattttttgcccaacgacgactgactccgagacatcggccattgcgggccatcgcgttttgtaatcagcataaattgcaacaacaggggtattataggcacttgccatatgtaatattgaggtgtcaggagttattgcgatataagcatcttttatgattgctgctgaacgtttaatcgagggtggtaaggataaacggtagacattattataacaatccactaatgccctggctttatcttcacctttgggtccatgaacgatcactattggtatatctgtttcactttaaatttttgctattagattttctgcaatcgataatgaaaatgtacgttcctgcgagctaccttctaaattgaacgcaatgtaagatcctaacgatcgcatttcctcgcgcacctcatcgagtacatcctcacttagtggcaattcatatattggcctgactgctggaaaacccgcctcacgcatcataaatgcccatgtcataggtacgggagcccggagtttctgatccatactggacgcgttcttgcacaaaggggagaagcaattcatggttataccaacaacctgaaaattcgtttttgctttcaactgactgataaataacatcgttttcaggttctttttacgcatcccctcaatgcaaagatccggcgtaccgtattgctgtgttatgttctttgctaaatcttttatttcttttaatgttgcgtgatcctgcatagtcattgtgactaatgttaatttagtctgttcaagtttaagcgcattaaagacttctaaattaattgtcgacgttacaattaaaagatgcttaattttatgcaattcaagcgcccgaataacaggaaagatggccatagcatcgccaatctgatcgggaatatggatgacaacaaagtctgttttttcaatattgaaattataagctttataatcgtagtaactaaatgcaatacgtctcaacaatgatgctaaaaacatacctaacctcgcctccctactggttataatgcaatgcagtctatcagactcatcagggtgccattttgtgcatatgcggacttttatgtttcatatctctaacctgtgggtcctctgcttaatccttaaacaacaccagcaactcctgcgctttcatcttccatcgaatttttcatgttgccgctaatcagccataaaatcatttgcagatgcgctctgtcgaggtagtctcataaggttcgtttatagatcgacggcaatgtgagttaccttttccatactaattataaaaagacagtacaaacaggatcattatggactccacgctcatctccactcgtcccgatgaagggacgcttagcttaagtcgcgcccgacgagctgcgttaggcagcttcgctggtgccgtcgtcgactggtatgattttttactctatggcatcaccgccgcactggtgtttaatcgcgagtttttcccgcaagtaagcccggcgatgggaacgctcgccgcatttgctacctttggcgtcggatttcttttccgtccgctcggcggtgtcattttcggtcactttggcgaccgactgggacgtaagcgcatgttaatgctgaccgtctggatgatgggcatcgcgacagccttgattggtattcttcctagtttcagcaccattgggtggtgggcacctattttgctggtgacactgcgtgccattcagggatttgcagtcggcggcgaatggggaggcgcggcgttgctttccgttgaaagtgcaccgaaaaataaaaaagccttttacagtagcggtgtacaagttggctacggtgtaggtttactgcttagtaccggactggttagtttgatcagtatgatgacgactgacgaacagtttttaagctggggctggcgcattcctttcctgtttagcatcgtactggtactgggagcattgtgggtgcgcaatggcatggaggagtccgcggaatttgaacaacagcaacattatcaagctgccgcgaaaaaacgcatcccggttatcgaagcgctgttacgacatcccggtgctttcctgaagattattgcgctacgactgtgcgaattgctgacgatgtacatcgttactgcctttgcacttaattatagtacccagaatatggggctaccgcgcgaacttttccttaatattggtttgctggtaggtggattaagctgcctgacaattccctgttttgcctggcttgccgatcgttttggtcgccgtagggtttatatcacaggtacgttaatcggaacgttgagcgcatttcctttctttatggcgcttgaagcacaatctattttctggatagttttcttctccataatgctggcaaacattgcgcatgacatggtggtgtgtgtgcaacaaccgatgtttaccgaaatgtttggtgccagttatcgctatagtggcgctggagtcggttatcaggttgccagtgtggttggcggtggatttacaccttttattgccgctgcactcatcacttactttgccgggaactggcatagcgtcgccatttatttgctggctggatgcctgatttccgcaatgaccgctttgttgatgaaagacagtcaacgcgcttgatagcctggcgaagatcatccgatcttcgccttacacttttgtttcacatttctgtgacatactatcggatgtgcggtaattgtatggaacaggagacacacatgaataataagggctccggtctgaccccagctcaggcactggataaactcgacgcgctgtatgagcaatctgtagtcgcattacgcaacgccattggcaactatattacaagtggcgaattacctgatgaaaacgcccgcaaacaaggtctttttgtctatccaagtctgaccgtaacctgggacggtagcacaaccaatccccccaaaacgcgcgcatttggtcgctttacccacgcaggcagctacaccaccacgattactcgccctactctctttcgtagctatcttaatgaacaacttacgttgctgtatcaggattatggtgcgcatatcagtgtgcaacccagccagcatgaaatcccttatccttatgtcatcgatggctctgaattgacacttgatcgcagtatgagcgctgggttaactcgctacttcccgacaacagaactggcgcaaattggcgatgaaactgcagacggcatttatcatccaactgaattctccccgctaagccattttgatgcgcgccgcgtcgatttttccctcgcacggttgcgccattataccggtacgccagttgaacattttcagccgttcgtcttgtttaccaactacacacgttatgtggatgaattcgttcgttggggatgcagccagatcctcgatcctgatagtccctacattgccctttcttgtgctggcgggaactggatcaccgccgaaaccgaagcgccagaagaagccatttccgaccttgcatggaaaaaacatcagatgccagcatggcatttaattaccgccgatggtcagggtattactctggtgaatattggcgtgggaccgagtaatgctaaaaccatctgcgatcatctggcagtgctacgcccggatgtctggttgatgattggtcactgtggcggattacgtgaaagtcaggccattggcgattatgtacttgcacacgcttatttacgcgatgaccacgttcttgatgcggttctgccgcccgatattcctattccgagcattgctgaagtgcaacgtgcgctttatgacgccaccaagctggtgagcggcaggcccggtgaggaagtcaaacagcggctacgtactggtactgtggtaaccacagatgacaggaactgggaattacgttacagtgcttctgcacttcgttttaacttaagccgggccgtagcaattgatatggaaagtgcaaccattgccgcgcaaggatatcgtttccgcgtgccatacgggacactactgtgtgttagtgataaaccgttgcatggcgagattaaacttcccggccaggctaaccgtttttatgaaggcgctatttccgaacatctgcaaattggcattcgggcgatcgatttgctgcgcgcagaaggcgaccgactgcatagccgtaaattacgaacctttaatgagccgccgttccgataataagttctgaaccttcttatcagaaatagatgtgaaggagtaagtaagacacctggcaaatagcctgcaataatcgtgggctgtttgcttccttgggcggatacgagttttattatcgtcttaatgatttccacatattaaaagcaagtatgctttcaaaacacaattataaaaaatcccgccaacaatataagtttttataaaattaaatataagattatggctttagaatatttttatttctaatagacgagatttttcctgttatgatataatatgctgaattaacacatgttaacgatttaccagtaatgtaaataaattttcgaggagatcattccagtgggacgtaaatgggccaatattgttgctaaaaaaacggctaaagacggtgcaacgtctaaaatttatgcaaaattcggtgtagaaatctatgctgctgctaaacaaggtgaacccgatccagaattaaacacatctttaaaattcgttattgaacgtgcaaagcaggcacaagttccaaagcacgttattgataaagcaattgataaagccaaaggcggcggagatgaaacgttcgtgcagggacgttatgaaggctttggtcctaatggcagtatgattatcgccgagacattgactagtaatgttaaccgtacgattgctaacgttcgcacaattttcaataaaaaaggcggcaatatcggagcggcaggttctgtcagctatatgtttgacaatacgggtgtgattgtatttaaagggacagaccctgaccatatttttgaaattttacttgaagctgaagttgatgttcgtgatgtgactgaagaagaaggtaacattgttatttatactgaacctactgaccttcataaaggaatcgcggctctaaaagcagctggaatcactgagttcagtacaacagaattagaaatgattgctcaatctgaagttgagctttccccagaagatttagaaatctttgaagggcttgttgatgcccttgaagatgacgacgatgtacaaaaagtttatcataacgtcgcaaatctctaattatcttttaaagaaatctgtctttacggcagatttctttaatctcatataattcttataaaaaatataatattcaactcgtcatattgattatacccccccgttcccagagaaataatatttattaaaattccagttcttctttttctgattacagaaggcaaagtggcaattacgcatagtttcccgataaagacgcgatagcgacatcccgcataaggcatttttctctttatctttgtacggtacttcatggaacagagtttttgaccttgcgaatcgtgatgtctgttggggagggacaatttgctcactgaagcgtgagactcgattaagcgcacgaaacacagaaatcaaaaaacccggtcacttttttacaaggtaaccgggtaaaaataatttttattttttaactgttttgagactcatagagatgtctcaaaactaaaatttggctcctctgactggactcgaaccagtgacatacggattaacagtccgccgttctaccgactgaactacagaggaatcgtgagaacgaggcgaatattagcgatgcccacccacaatgtcaaagcctgttttttaaatttgaaatcgtttgctgaaataatctgcattttgtcgtttattcgctcacaactggctttttttcacacttttgcggctcgggtcgagggtatttccatagccaacgtccagtaaccattcgccagtaaaacagcacggcccgcacagcccagtcggcaaacattcccatccagacaccaaccacaccccagccaagcatgattcccagcacataaccgactacaacccgacaaccccacatgctcaacatgctaacccacatggcgtaacgggcatcacgagcacctttaaatccagcgggtagcacccaactggcggaccaaataggcataaataaagcatttagccaaatcagaatcacaacgacatgtttaacctgtggatcctgggtgtaaaagcttgccataaccccggcaaagggagccgttagccaggcgatggccgttaatccaagagtggaaagccagaacacatgccgcaactgaatctctgcttgcgctatctgccctacccccaaccttcggcctgtaatgatcgtagaagcagagccgagcgcacttccgggtaagttgataagagccgcaatactaaacgcgataaaatttccggcaataacactggtccccatcccggcaacgaacatttgggttaataaccgaccactggtaaataacacactttcgacactcgcgggaataccaatccccatgacttcccagataatgctaaaattcagcggtttaaaatagctctttaagctaatccttagcgcaggattaaaaccaatcgccagcacccacaaaattgcaactgcgccaatataacgagaaatggttaaacccagccctgccccgacaaatcccagtcccggccaggagaaaaggccgtaaatcaatatgccgctaataataatattaagaatattcaggctaccgttaatcaatagcggtattttcgtattccctgcaccacgaagtgccccgctaccaataagagtgatggcagctgctggataactgagtaccgtcagctccagataagtcaacgccagtgctttaacttctgtcgtggcatcacccgcgacgaaatcaataatttgttcgccaaaatgatgaataagcgttgccaacagtacggcaaacaacgtcatgatcaccaaactctgccgcgtcgccaccctcgctcgtcgtcgatcccgcttaccgagactaaatgccacaacgacagtagtaccaagatcgatagcagcaaaaaaagccataatgaccatattgaagctgtccgccaatcccacgccggccatcgcatcttttcccagccagctgaccagaaaagtgctcagaacccccatcaacaggacacaggcattctccatgaagataggaacagcaagcggggttatctcgcgccagaacaacactttgtagctcttgcgtttagcgtgccagcgagtgccgtgaacaacctggcgtaaagcagaggagatattcaaagcgctccttaattgcagaaagtgaaaccacatttcaaataaactgggagaatcagcaaagctgcaaagattttcgccaacaaattgtctgcaaatgcaacaaactgtacttagaaacggcaaacagttggggaatttaaaaatcgggttactcaaaagatttttcgccgttaagatgtgcctcaacaacgattcctctgtagttcagtcggtagaacggcggactgttaatccgtatgtcactggttcgagtccagtcagaggagccaaattcctgaaaagcccgcttttatagcgggatttttgttatatctgataatcaatttcctcttcactgctttccatcacctgccgcttgatatcctcaacactcagtcctgcattacaaagttccagaaagcgccagacatagttacgctgaagttgtcctcgcttcagtcccaaccagacagtattagcatcaaaaagatgccgcgtatccaggcggattaaattctcttcctcttgttcgccactggattgctcggcaactaatccgatcccaagcccaagagcaacataggttttaatgacatcagaatcctgcgcacttaatacaatatctgccagcaaacctttgcgggcaaatgcgtcatcaatacgactgcgccccgtaatcccctgtcggtaagtgattaacggccacttcgctatactttccagcgtcaatggactaatttgcgtcaagggatgatcgtgtggaacaagcaaactatggtgccaacgaaaccacgggaaggcgacgagctgcgggtcattactcaaacgctcgctggcgataccaatatcagcttcgccattttgcaacaatgtcgcaatttcctgtggcgtcccctggattagctcgagccgaacctccgggaaaagttcgcgaaaagctttaatgacctctggcaagctataacgtgcctgagtatgcgtcgttgcaatagtgagaacgccagacgtatcgttggtaaacaggtctgcaagccgacgaacattactggcttcattcagaatacgttctgcaatgaccagtaatgctttgcccggttcagtcatgcccagcagtcgcttacctcgtcgaacaaatatttcgatgccaagttcatcctccagttcccgaatatgacggctgacgccactctgactggtaaaaagcatattcgcaacctctgtcaggttgtaatcctgacgtgcagcctcgcggattatctttagttgttggaaattcacggtaaactccgggcagttcagatttcccgttattgttaaagtctaatgcccggcataacaaataataaaaacccgcatcttattccatcccgatataacacttagctcaccaattgccactgccttttttccatcactggagaactaatcacactcattaacaactctttcactgcctgtgcctgtgggcttaagttcgctctggcgggtaaatttaaactcaaagagagactcatggaaggagtggtaatgcgactcatccacccatttactgcgccacataagctacgcgcggcgctttcgggtaatactgcaacgcccatgccgctggcaatcgctgcggtaagcgtggcaatagactcaatttcaccaataacttttgccgtgagtcgccgtagggaaaaagcctcatcaacacgaagtctaatagcactgtaatcactggggagaaagaggttcatttgcgcaatagcattcacatcaacgctttgccccgggcaatcttgagttcctaccagaaaaagatcttctttcagcaaagcctgactggatacaccagccacaggggaatgctcataaatcaccgccatatcgagttggtgatttatcaatttttcgttaagcactgcaccactattttcatgaagatagataacgatctccggaaattcagcgcgaaccgcctgtaataagggcatggtgatggaactcgcagcggttcctggtgcaaagccaatgctgacttgcccgcttaatgcctgaccaacgttatgcaccgccagttgggcctgttcacactgacgtaaaatggcccgcgcatgggtatagagaatttttccggcgtctgttggtgtaacgccccgctttgtacggatcaaaagttgttgatttaactcaccttccagtgtggcaacctgctggctgagcgctggttgtgcgatatgcaatacttcagcagcctgggtcaggctaccaatatctacaatttttacgaagtatttcaggcgtctgaagttcatgttgcctccggtttttaagaatcggcccaagtgccgccattacttacaaccagattgcaagatgcttgccagttttattttggtgttgatgtacaagctaaccaactgtcaaataagagattatgatagattcgtcatttgctcctttaatcagctgtcgcgttcccctgccctataaaaggagggtatgcaccacgatggttcattacccaataagattgaaagctcaccactttgttgaaattgacagcaaacaaacaaaaaaatgcatttcaccctttgacatcaccatgcactgccattaatatgcgccccgttcacacgattcctctgtagttcagtcggtagaacggcggactgttaatccgtatgtcactggttcgagtccagtcagaggagccaaattcaaaaaagcctgctttctagcaggctttttgctttctaattaccaacgctcttaaaacatctgtctactaccagaactaatttgcacaggcattccgcttcgacgttgcaacgcagcatttgcgcgatttacatcaacttcttgcccgttgataaacgcccgcaaagatggggttaccggcaatggcacttttcggtcagactcatattctgcacgattgcggctcaatggctcatgaacttccagccagttgctgccatctggttcagtggtgtattttactggctggtcgataatttgcacacgcgtcccaacaggaacattatcaaacagatatttgatatcgtcattgcgcagacgaatacagccctgacttacccggagcccaataccaaaattggcattggtaccatggatggcatacaacctgccaatataaatcgcgtacagccccatgggattatcggggcccgcaggaacaaatgcgggcaaactctcccctcgtttcgcatattcgcgccgagtgttcggcgttggcgtccaggttggagcttcttgtttacgttcaacggtagtcacccagttacgcggggtttctcgcccagcctggccgataccaataggaaagacttccacagtattactgtctggtgggtagtaataaagacgcatctcagcgacgttaacaacaatccctttacgaacagtgtcgggcaaaatcagttgctgcggaatggtgagttggctgccagacttcggcaaaaaaacatcagcgcccgggttcgcttccagcatgttacttaacccttgcccgtattgtgcggcaaaagtctccagcggctgggtattgtgatcaggaacagttacagtaaagctctgccccactaaacggctaccctctggaggtaatggataagttaccgccaggctagtatggctggcaaaaagcagagcaaaactgcaaagaatatttacacgacgcatcatgtccctttcctatgtcgcgaaagctatccgttaagtatagcttttatcagacttttcgtttttaactgttcaaatcagaagtcgtattccccggtagaacaatattactggcagcaagttcgcccatgttgttgtatatcgcacaggcagcttcgatgatgggcatcgccagagctgcgccactcccctcacctaaacgcatctccatattgagataaggctccagccccaaatggctgagcgctatacgcgcgcctttttctgcgctcaggtgagaaggaatgagatacggtttgatcgcaggagacatctggcaggctgcgagcgcagcagcataagaaagaaatccatccagcaacacgggtaaaccgcaggaagcagcacctaacatcactccagctattccgaccaaatcaaatccacccacttttgccaggacatcaacaccatcctgaggatttggttgattcaacgtaatcgcccgacgcacaacatcaattttattagccagtttatctgtcggcaggtttgcgccaatcccaaccacttcttcaggatcccggccagtgattgtgctgactattgctgctgccggtgtcgtgtttgccatccccagttcacctacaccaaacagcgtgacaccgttttttgccagctcctgcgtataacatatgacgtccaaaagcaacttttcagcctgacggcgactcattgccggagcactagcaatattgccgctacctcgtgcgacacgcatgttgataagcccggggataggctcagcagtatcaataccaacatcaattacgtggacgttagcgcccgcttgttctgccagcacacacacgccggttgttccacgggtcatattttcagcctgtatggctgtcacttcttttggagaaatagcgaccccttcctcccagacgccgtgatcggcacacataaccagtaccgcttttttgcccacatgcggtatgccattcaaccccggcattcctgccagttgtatggcaagcacctccagctttcccaggctaccaacaggtttgagtaacccgtcaatatgccgttgtgcacggctcatagcggtagaatcgatggctgggatcgtattcagtaaatcggcaagtatttgcatctcacgtctctttatagcagtgccagcaggaagaccagttcaccaagctctatggctgctcccagcgtatcgcccgtttgcccgcccagcgtacgtttgagaagctgaccgaggatgaaaatcgccaccatcgtcaccaccatagcagccacaccatgcatacccggcaataatacggcagcaaaaatagcggctaagccgagtgtgacgcaggtttgtcgcccatcaattttgccaatgaacacattgccaagcccttcttcccgcgcataacgatgacgatacatcaataatgcggcagtcccgcggctgaccgcacatgctgccgccaggcttgcaaggatgctttcgccacgcagagccaactcgcttaacaccagaatctttgccagtaccacaaaaatcaatgccagaccgccgtgggtgcctaaacggctatcacgcatgatttccaacatgcgatcgcggctacgtgcagaaaatacgccatcacaggtatcagcgaggccgtccagatggaatcccccggtcatcagcaccagcacaagtacgctaaacagtgccgccagtggtgcgccacaccatgcctgcagcaccatgaagaccagcccgctaatcgcgccaagcaataatccaatcaaaggaaaagtaataataccgcgagaataatgctcgaaatccagtccctgggaccagcgacgcggtacaggcagacgcgtaataaaactgagcatcgcccaaaataatttactcatttgatttttactccaataccgctaaccaccagccatacttcatttgccgcagcggccaactgctgatttacccgcccggcaatatcacgaaaatgtcgtgccagacgactctccggcacaatccccattcccacttcgttagtcactaatacaacctttgcggggcaacgttggcaggcagcaatcaagctctgaatctcagcattaatcgcctgttccatcgcctgataatcccattcatcagggtctttatcgccgccataatcaaacaacagattagtcaccattgtggtaacgcattcaagcaacacaacctcattcgggttaatgtctgcatgaattaattcatcaagatgttgccagcgctccactgtgcgccagtgctccgggcggccttgccgatgatgttctatccgtgcagccatctcatcatcaaggatttggctggtagcgatatacagaacctgactagagtccccaataagcgcctctgcgtggcgactcttcccgctccgtgcgccccccgtcaccaaaatcatcataccgactcctgattcaaatgtatgatggtattcattgaacagaacaatggatcccccaccgttgctgaccgcaaaacatttacgcgattaatactgcgcgtaatataattaaaaatccagcattctcaatccattacgaaataagatggcattacggaatagccagactttctcgtgttaacgtccgacaaaatgcgtcattgacagcggtttctgtggattgacacatttcattcagataatgaattaatgctactgccggaacaaccagcaaacgggcattgtgttctgaaatccaggctattgattcaacgtcagcgacagatctgcgctgtaaaagaacttgtaaaacaacgtaatagaattatccggaatggtggcgactatgcactagggaaggtgcgaataagtggggaaattcttctcggctgactcagtcatttcatttcttcatgtttgagccgattttttctcccgtaaatgccttgaatcagcctatttagaccgtttcttcgccatttaaggcgttatccccagtttgcagaaactccgtaatgagattaaaagcgctcataactcatctgtcggccagaaggcgcgcctctgaattatccgacggacaaaccgggaacagtgtaatttcccggcaggagcgaaaaaattgaaaggcgcatcttactcttttcgctttcaaaaaaaagagtggtcatcgcgttaacacaccgccctgagatgaattagtgatgttttggctgcaccgcaacatacatttcgatatcccagtacccatcttccgcgccattgttcaaataaacctcgaagcagggctttggtaacatttcataagcactgtcctgcaagagactattaaagaactgataccagggtttagcaaaatcatcaccgactacacgagctaccgccaccgcatactgaccacctgtaatttctgtcagaatgacgccctcactgttttcgggaagcgtaaagtaacccggcaccgtcacgacggtgtcgcagcgtaatttttcggcgggtgtttcatctggattgtcgtaatagacagcaacccactccttcggcacaatatttttgctatctacccacatcatcaactgctcaaagcctttctttaccgtctgttcccacgggccaacgagatggaaacctgcaacggtacgtttctcttcctgcttaatctcgtagttcatgacgcctccattgatactgtttttatatacagtatagttgcaaaattaaaaccacaaggaatgagtgttgattatgcgagcagactcgcactcctgccagtctgctgcaaaagaaaggtcaggccttatggtggaaataatcactcaggcgagaaaacatgctgccttccccgacagattccagggtaaccagcggccagtgcgccacctgtttatcacggtcgtaaagttcaatttcccctacccgctgatgggcgctaattggcgcggtgagttctttaccatcaagggtatatttggctttgatatgtggaatttcggctttcggtagcaccatccagaactcttgttccgttcccaggtcgatattttctttatcgccataccagatgcgttccgttccgacctttttcccacggtgcaaaatttgcaccgtagtaaagttttgttgcccccaacgcagtaattttcttgcctcttcctcacgaccttttgcactgtcagcccccattaccactgcaatgagacgacgctgcccatctacagcgctagcaatgagattaaacccggcaccagaagtatgacccgttttcaggccgtcaacattcatggttttatcccacaacaacccgttacggttttgctgggtgataccgttccaggtgagacttttctcactgtacatatgataaaactcgggctcgccgtggatgatagcacgagaaagcacagctaaatcataagcgctgctatgctggccaggtgcatccagaccatgcactgtttcaaaatgcgtatccttgagatgcagcttctcggcatagttgttcatcatttcaacaaactgccgttgcccaccggcaatatagtcagccagagcaacacaagcgtcatttccggaatccacaattaaaccacggcttaaatcacgtacgcttacgcgatcgccctctttcaaaaacatcagactagaaccgacaaacaccggattatctttcgcccacgcatcgcgccccacggtgacaatatcgtctggcgtaatgcgatgactatcgatagcgcgatccacgacataacccgtcatcagctttgtcaggctggcgggattgcgctgttgatgctcattacccgcggtgaggatctgaccggtggtgtaatccatcaatacccaggacccggcatgaatctctggaggctgaggactaaaaggaatgttttccgccgcaaaaccagagcttaagttaaaaacgaacaaagaagcagcaataataagacggcgtttcaacagcaaaccctcaggagtttcaaatagctgttctttttacggaaatacttatgaactggctggaataaagtgcaagaaaatgtgactaccctctcatttttatctgacatgatctgttgccactcgctgccaaattgtggcgctaaagctgattagcacggtgatatttgatactctggcagacagcagaaataacggatttaacctaatgatgaatgacggtaagcaacaatctacctttttgtttcacgattacgaaacctttggcacgcaccccgcgttagatcgccctgcacagttcgcagccattcgcaccgatagcgaattcaatgtcatcggcgaacccgaagtcttttactgcaagcccgctgatgactatttaccccagccaggagccgtattaattaccggtattaccccgcaggaagcacgggcgaaaggagaaaacgaagccgcgtttgccgcccgtattcacagcctttttaccgtaccgaagacctgtattctgggctacaacaatgtgcgtttcgacgacgaagtcacacgcaacattttttatcgtaatttctacgatccttacgcctggagctggcagcatgataacagccgctgggatttactggatgttatgcgtgcctgttatgccctgcgcccggaaggaataaactggcctgaaaatgatgacggtctaccgagctttcgccttgagcatttaaccaaagcgaatggtattgaacatagcaacgcccacgatgcgatggctgatgtgtacgccactattgcgatggcaaagctggtaaaaacgcgtcagccacgcctgtttgattatctctttacccatcgtaataaacacaaactgatggcgttgattgatgttccgcagatgaaacccctggtgcacgtttccggaatgtttggagcatggcgcggcaataccagctgggtggcaccgctggcgtggcatcctgaaaatcgcaatgccgtaattatggtggatttggcaggagacattagcccattactggaactggatagcgacacattgcgcgagcgtttatataccgcaaaaaccgatcttggcgataacgccgccgttccggttaagctggtgcatatcaataaatgtccggtgctggcccaggcgaatacgctacgcccggaagatgccgaccgactgggaattaatcgtcagcattgcctcgataacctgaaaattctgcgtgaaaatccgcaagtgcgcgaaaaagtggtggcgatattcgcggaagccgaaccgtttacgcctagtgataacgtggatgcacagctttataacggctttttcagtgacgcagatcgtgcagcaatgaaaattgtgctggaaaccgagccgcgtaatttaccggcactggatatcacttttgttgataaacggattgaaaagctgttgttcaattatcgggcacgcaacttcccggggacgctggattatgccgagcagcaacgctggctggagcaccgtcgccaggtcttcacgccagagtttttgcagggttatgctgatgaattgcagatgctggtacaacaatatgccgatgacaaagagaaagtggcgctgttaaaagcactttggcagtacgcggaagagattgtctaatttgaagcctccgccgctggtacggcggaggacaatgttgagtcaggctttttgaacggtgatgctccacgctgcatcgccaatctgctgataatcggtgatggcatgtccttcttctgccgcccactgtgggattgcttcagttgcctgggtgcaatcaaactcaatcactaactcatcgccgctgaccatttctgccagagctgcttttgcttctatgagtggaaacggacagacctgcgtcaccacatccagctttttaatcaccatctttacaccttacttaatttgccgcagcagttgccagtcgcgccttacgctgcggtcgaacatacacaagccaggacgcagtccagactccgagaatcataaatacaaggccaatccagccctgccaggtcatcattgcagtcataaccagtccattaccgatagagcaaccacctgcaatactggcaccgaagcccatcagtacaccacctaacccgctacgtaatgttgtttgtgcatcagctgcgcgaacgcggaactcacggctcgctttggctgcaataaaactccccacgaagatccctaacaccaggaaaacgccccagttaatgtatttcatgtcacccgcgaccagaaattgcagaatattggccgttggggaagtgattcctaacccaaacatgcgtccggttgcttcactcaggggccaggctaaaagcgcaatcaaaccgatgagtacagctgtgacaaagggatgccagcgtttttcaaacagaatatgagcgatcccggttcggcgcggcggtaaggtcgcgactttgagttttggcttcttcaactctttcatcaccacccagagcgttatcaccagcaaaacggcaaccaacggccacacagacaaattaaaagtctcagcaatagagttatgttcagtactgtagtgctgcaaggtttgatttaaaccactggcatgtggagaacgcatcaccgcactcatcaccatataagtgaaaagcgcgatccaactgccgatcaatccctcacccgcgcgataccaggtcccggtggcacatccacccgccagaacaattcccagcccgaagatatacccacctataacagtaccaagccacgggaacgccccggcttcgtaagtcagtaggcccgcctgaattaacgcaaaaacccccacgctttgtacgctaattgcaatcagcaaggcgtaaaacatgcgattatttttcacgatatacatatcgcgaaaaccacctgtcaggcaaaaacgcccacgctgcatgacaaatcccagcagagcaccacaaattagcccgcttaatatcatactaaacataaattaattaaccagatgaatgttaatgaggaaattattcatgactggtggaatgcagaccaataaccaaattctctaaattagaacaaatggttattaatgaggagttcgatacaaaagaataaaaaaaccggagccaaatgttcattcgactccggtttattattagaaaagatgattatgctacgtcttcgtactgcggaaccggattacggaagctcttggtgacgcaagccaggtaaatcagaccgatagcagcccagatcagacccagaaccatactgctttcttccaggttaacccacagcgcaccaacggtcagcgcaccacacatcggcaggaacagatactggaagtgatctttcagcgtcttgttacgcttctcacggatccagaactggctgatgacgctcaggttaacgaaagtgaacgccaccagcgcaccaaagttaatcagcgccgttgccattaccaggtcgaagttgattgccagcagggcaatcgcgccaaccaggatgatgttcatcgccggagtacgccatttcgggtgtacataaccgaagaagcttttcgggaatacgccgtcacgacccattacgtacatcagacgcgctacgcctgcatgcgccgccataccggacgccagtacggtaatggtggagaagatcagcgcgccaacctggaacgctttacccgcaacgtacagcatgatttcaggctgactcgcatccggatctttaaagcgagagatatccgggaagtacagctgcaggaagtaagttgcaaagatgaagatcatgccgccgatcagcgcggtcaggaaaatcgcacgcgggatcacgcgctctgcatctttggtttcttcgctcaggttgctgatgccgtcaaagccggtaaaggagaagcacaggattgtcgccccggtaatcatcgggataacatgcgcatcgccagaccagaatggacgagtgctcgccagcgtaccagcgccttcaccttcaaatacgccataaacaaccatgcccagaatcaccgcgatcagcactacctgcaacacgacgattacagtgttgaagttcgctacggatttcagactacgcaggttaaaggcggtcataaaggccaccagcgccaccacaaacatccagcttgggatggaaggcaccagagcttcaaaatagattttcgccagtagaatgttgatcatcggcgcgaacagatagtcgagcagagaagaccaacccaccataaagccgacagtcgggctaatggatttctgggcgtaagtgtatgcagagccagcagaaggatagcggcgaaccagcttcccgtagctcagagccgtaaacaggatcgcaatcaatgcgaacgcataggctgtcggcacatgaccatccgtgaggccactaacgataccaaaagtatcaaacagcgtcatcggctgcatataggcaagacccatcattacaaccggaactaacgtaagcgttttacgcaattccacgcgagaggtgtttggagtaacgttatggctcatggtcattctcctttacggtgataaccgtcgcgtaagcaaaaaattgccccatttttttggattcctcagcgacaacaactgtcgatttttagtaaatatctatccggtacgaagcccggcctcttggtatgaatgattggtttgaagcaaaaaataaccgacgctgatgaaacgtcggtttttagtcattttttgacagcggcgcattgtgcctaaatgggggggaaatgacaagagaatgagaggcttgtcagaataatttttctttaaatggcactttttccgtcatcagattttgcataaacaccggcgatcgcactatttgctaaaatttcatcccgccaccagccactggcaagtcctgcggtctgttcgttccagccaatccagacgggttcaaagagagtttgggcgaccactttcttctcgattaacgcgccactatcgagaaaacgttgcgccagataacggggtaaatagccgcagccgaggccgctaatttgcagctccagtttggttttaaaatcgaaaacggtaatggcttcttgttcgtcgagaagttgacttgccgtagaagcgcctgcctgcgcagtatcccccaccacaatcgcccgatatcgcttaataatacgacgatttaacggctcttcttccagggctaacggatgatgaggcgcgaccgcaaagacttgttccagatcgcccaaccgactaaaaccaaactcactggaagatggtggctcatgcatcgcgccaacaataatatccgctcgcccctgagtcagggcatcccaactaccaccgagtacgccattgataaacttcaggcgcgtcacgctatgatgttgataaaaagcttcaatgagtggcgcaagcagagaaaaaggaaacgtgtcgtccacgccaatcaccagctcgttttcccagccttcatgcagtttgatcgcctgcttttccagttcccgcacggtatgcagaacttcccgccctttctctaataacatttttccggtgcgggtgaatttagcgcggtgtccgctacgatcaagcaattgaatattaaggtcgctttccagcttgtgaacggtgtaactcagagcggacggcgtcttgtagagtttggcgctcgccgccgcaaaactgccttctttttctaaggcatcgaggatcatcaacacatccagcagtggtttcatacacgcccccttgcagtgcatgcggcgtcctgctggcgtgatcgtttactccagcggcattaccagcggatcgggatactggtattcaaatcccagttcattacaaatccgactgccatcaataatcttacctttgccgctgtccagactatttctgaactgcggaggttccagccccagtaaacgggccatctgcggatagaaaacattacgcgcagggtgagctggcgcacatatattatagatgtgtccgcctttaggtgcctgtaacaacagagtgatagcgccaataacatcttctaaatggactaaattaacaccatgttcaccatcaggcgcggtttttccggcaaagaagcgtccgggatgacgtcccggtccgaccaggcccgcaagacgcagaatatcgacgctagtaccgggtaaattgtgcagccagtcttcgagttcttctaatactcgtccactgttggttactggattacgcggggtggtttctttcaccgtgccttgcgcgtcgccatagacagatgtactgctggtaaaaataatgcggggaatacgatgggccagcgcgctatccactaactcttgtaccgcttgtaaatagaactcatcgccggggccgctacgacgtgccggaagcgtaatgaccagcgcatcggcatccatcagggcatccagatcgtcagaatcgcaaactagctcaggctccatgcgaagcagatagctatcaatgccactcattcgggccgcttcgacaccatcttgtgtggttttactcccggtgacttgccagcctcgcgcactaagactcatcgccagcggcatgcctaaccaccctaacccgacaattgcgacctttttcatccgttatctcctgatacaccttagatctataaggctacgctagcgtatcaaaactgacaattcattctatgaatgaatctgttcaataatgataacgacatgctgcaatgagcagactatcgtcggtaaccgcgtataccagacggtgctcctctgtaatgcgtcgggaccagaaaccactcaaattatgtttcaggggttctggcttccccttaccttcaaatggcgttctgcgggtatctttgataagttcattgatctttttaacaattcgcttatctgtttcctgccagtacagataatcgtcccaactttcctcagaccagattagtttcactcaatgatgtccttttccgttcctttgccacttttcaggctatcgatactgtccatcaatctccgggcgttagcgggggagcgcagtagataagccgtctcttccaggctgttgtattcttcgagactcatcagaacacaagcctctccattctgacgagtaataaggatcggggcatgatcttcaacggctttcatcattgttgcgctcaaattctgacgcgcttcgctgtagctaattgtacgcatgtcaatctcctcttttgtacagttcattgtacaatgatgagcgttaattaactatttattaattagtttgtagatcaaggtattgtcagtgagacgaaaatccaggcttcgctatttttggtgccatcagctaagaggacagtcctcttagccccctcctttccccgctcattcattaaacaaatccattgccataaaatatataaaaaagcccttgctttctaacgtgaaagtggtttaggttaaaagacatcagttgaataaacattcacagagacttttatgacacgcgttcaatttaaacaccaccatcatcaccatcatcctgactaatctttcaggcgatgtgtgctggaagacattcagatcttccagtggtgcatgaacgcatgagaaagcccccggaagatcaccttccgggggcttttttattgcgcggttgataacggttcagacaggtttaaagaggaataacaaaatgacagacaacactcgtttacgcatagctatgcagaaatccggccgtttaagtgatgacagtcgcgaattgctggcgcgctgtggcattaaaattaatcttcacacccagcgcctgatcgcgatggcagaaaacatgccgattgatattctgcgcgtgcgtgacgacgacattcccggtctggtaatggatggcgtggtagaccttgggattatcggcgaaaacgtgctggaagaagagctgcttaaccgccgcgcccagggtgaagatccacgctactttaccctgcgtcgtctggatttcggcggctgtcgtcttagcctggcaacgccggttgatgaagcctgggacggtccgctctccttaaacggtaaacgtatcgccacctcttatcctcacctgctcaagcgttatctcgaccagaaaggcatctcttttaaatcctgcttactgaacggttctgttgaagtcgccccgcgtgccggactggcggatgcgatttgcgatctggtttccaccggtgccacgctggaagctaacggcctgcgcgaagtcgaagttatctatcgcagcaaagcctgcctgattcaacgcgatggcgaaatggaagaatccaaacagcaactgatcgacaaactgctgacccgtattcagggtgtgatccaggcgcgcgaaagtaaatacatcatgatgcacgcaccgaccgaacgtctggatgaagtcatcgccctgctgccaggtgccgaacgcccaactattctgccgctggcgggtgaccaacagcgcgtagcgatgcacatggtcagcagcgaaaccctgttctgggaaaccatggaaaaactgaaagcgctgggtgccagtagtattctggtcctgccgattgagaagatgatggagtgatcgccatgagctttaacacaatcattgactggaatagctgtactgcggagcaacaacgccagctgttaatgcgcccggcgatttccgcctctgaaagcattacccgcactgttaacgatattctcgataacgtgaaagcacgcggcgatgaggccctgcgggaatacagcgcgaagtttgataaaaccacggttaccgcgctgaaggtgtctgcagaggagatcgccgccgccagcgaacgcctgagcgacgagctaaaacaggcgatggcggtggcagtaaagaatattgaaaccttccacactgcgcaaaaactgccgccggtagatgtagaaacgcagccaggcgtgcgttgccagcaggtcacgcgtccggtagctagtgttgggttgtatattcctggcggctccgccccgctcttcagtacggtattaatgctggcgactccggcgagtattgcgggctgtaaaaaagtggtgctgtgcagtccgccgccgattgccgatgagatcctttatgcggcgcagctgtgcggtgtgcaggacgtgtttaacgtcggcggcgcacaggccattgccgcactggcgtttggtacggaatctgtgccaaaagtggacaaaatcttcgggccgggtaacgcctttgtcaccgaagcgaaacgtcaggtgagccagcgtctggacggtgcggcgatcgatatgcccgcaggcccgagcgaagtgctggtgattgctgacagcggcgctacgccggatttcgtggcttctgatttgctctctcaggctgaacacggcccggacagtcaggtgattttactgacgcccgctgctgatatggcgcgtcgcgttgccgaggccgtcgaacgccaactggcagaactgccgcgtgccgaaaccgcccgccaggcactgaacgccagccgcctgatcgtgactaaagatttagcgcagtgcgtggagatctccaaccagtacggcccggagcacctgatcattcagacccgcaacgcccgtgaactggtcgatagcatcaccagcgccggtagcgtatttcttggtgactggagtccggaaagcgcaggtgattacgcctccggcaccaaccacgttctaccgacttacggttacaccgccacctgttccagcctcgggctggcagatttccagaagcgcatgaccgtacaggaactgagcaaagaggggttctccgcgctggctagtaccatagaaacactggccgccgccgagcgcctgaccgcccacaaaaatgccgttactttgcgtgttaacgcccttaaggagcaagcatgagcaccgtgactattaccgatttagcgcgtgaaaacgtccgcaacctgacgccgtatcagagcgcgcgtcgtctgggcggtaacggcgatgtctggctgaacgccaacgaataccccactgccgtggagtttcagcttactcagcaaacgctcaaccgctacccggaatgccagccgaaagcggtgattgaaaattacgcgcaatatgcaggcgtaaaaccggagcaggtgctggtcagccgtggcgcggacgaaggtattgaactgctgattcgcgctttttgcgaaccgggtaaagacgccatcctctactgcccgccaacgtacggcatgtacagcgtcagcgccgaaacgattggcgtcgagtgccgcacagtgccgacgctggacaactggcaactggacttacagggcatttccgacaagctggacggcgtaaaagtggtttatgtttgcagccccaataacccgaccgggcaactgatcaatccgcaggattttcgcaccctgctggagttaacccgcggtaaggcgattgtggttgccgatgaagcctatatcgagttttgcccgcaggcaagcctggctggctggctggcggaatatccgcacctggctattttacgcacactgagcaaagcttttgctctggcggggcttcgttgcggatttacgctggcaaacgaagaagtcatcaacctgctgatgaaagtgatcgccccctacccgctcagcacgccggttgccgacattgcggcccaggcgttaagcccacagggaatcgtcgccatgcgcgaacgggtagcgcaaattattgcagaacgcgaatacctgattgccgcactgaaagagatcccctgcgtagagcaggttttcgactctgaaaccaactacattctggcgcgctttaaagcctccagtgcggtgtttaaatctttgtgggatcagggcattatcttacgtgatcagaataaacaaccctctttaagcggctgcctgcgaattaccgtcggaacccgtgaagaaagccagcgcgtcattgacgccttacgtgcggagcaagtttgatgagtcagaagtatctttttatcgatcgcgatggaaccctgattagcgaaccgccgagtgattttcaggtggaccgttttgataaactcgcctttgaaccgggcgtgatcccggaactgctgaagctgcaaaaagcgggctacaagctggtgatgatcactaatcaggatggtcttggaacacaaagtttcccacaggcggatttcgatggcccgcacaacctgatgatgcagatcttcaccagccaaggcgtacagtttgatgaagtgctgatttgtccgcacctgcccgccgatgagtgcgactgccgtaagccgaaagtaaaactggtggaacgttatctggctgagcaagcgatggatcgcgctaacagttatgtgattggcgatcgcgcgaccgacattcaactggcggaaaacatgggcattactggtttacgctacgaccgcgaaaccctgaactggccaatgattggcgagcaactcaccagacgtgaccgttacgctcacgtagtgcgtaataccaaagagacgcagattgacgttcaggtgtggctggatcgtgaaggtggcagcaagattaacaccggcgttggcttctttgatcatatgctggatcagatcgctacccacggcggtttccgcatggaaatcaacgtcaaaggcgacctctatatcgacgatcaccacaccgtcgaagataccggcctggcgctgggcgaagcgctaaaaatcgccctcggagacaaacgcggtatttgccgctttggttttgtgctaccgatggacgaatgccttgcccgctgcgcgctggatatctctggtcgcccgcacctggaatataaagccgagtttacctaccagcgcgtgggcgatctcagcaccgaaatgatcgagcacttcttccgtagcctcagttacaccatgggcgtgacgctacacctgaaaaccaaaggtaaaaacgatcatcaccgtgtagagagtctgttcaaagcctttggtcgcaccctgcgccaggccatccgcgtggaaggcgataccctgcccagcagcaaaggagtgctgtaatgaacgtggtgatccttgataccggctgcgccaacctgaacagcgtgaagtctgccattgcgcgtcacggttatgaacccaaagtcagccgtgacccggacgtcgtgttgctggccgataaactgtttttacccggcgttggcactgcgcaagcggcgatggatcaggtacgtgagcgcgagctgtttgatctcatcaaagcctgtacccaaccggtgctgggcatctgcttagggatgcaactgctggggcggcgcagcgaagagagcaacggcgtcgacttgctgggcatcatcgacgaagacgtgccgaaaatgaccgactttggtctgccactgccacatatgggctggaaccgcgtttacccgcaggcaggcaaccgcctgtttcaggggattgaagacggcgcgtacttttactttgttcacagctacgcaatgccggtcaatccgtggaccatcgcccagtgtaattacggcgaaccgttcaccgcggcggtacaaaaagataacttctacggcgtgcagttccacccggagcgttctggtgccgctggtgctaagttgctgaaaaacttcctggagatgtgatgattattccggcattagatttaatcgacggcactgtggtgcgtctccatcagggcgattacggcaaacagcgcgattacggtaacgacccgctgccgcgattgcaggattacgccgcgcagggtgccgaagtgctgcacctggtggatctgaccggggcaaaagatccggctaaacgtcaaatcccgctgattaaaaccctggtcgcgggcgttaacgttccggtgcaggttggcggcggcgtgcgtagcgaagaagatgtggcggcgttactggaagcgggcgttgcgcgcgtagtggtcggctccaccgcggtgaaaagtcaagatatggtgaaaggctggtttgaacgcttcggtgccgatgccttagtgctggcgctggatgtccgtattgacgagcaaggcaacaagcaggtggcagtcagcggctggcaagagaacagcggcgttagtctggaacaactggtggaaacctatctgcccgtcggcctgaaacatgtgctgtgtaccgatatcagccgcgacggcacgctggcaggctctaacgtctctttatatgaagaagtgtgcgccagatatccgcaggtggcatttcagtcctccggcggtattggcgacattgatgatgtggcggccctgcgtggcactggtgtgcgcggcgtaatagttggtcgggcattactggaaggtaaattcaccgtgaaggaggccatcgcatgctggcaaaacgcataatcccatgtctcgacgttcgtgatggtcaggtggtgaaaggcgtacagtttcgcaaccatgaaatcattggcgatatcgtgccgctggcaaaacgctacgctgaagaaggcgctgacgaactggtgttctacgatatcaccgcttccagcgatggccgtgtggtagataaaagctgggtatctcgcgtggcggaagtgatcgacattccgttttgtgtggcgggtgggattaagtctctggaagatgccgcgaaaattctttcctttggcgcggataaaatttccatcaactctcctgcgctggcagacccaacattaattactcgcctggccgatcgctttggcgtgcagtgtattgtggtcggtattgatacctggtacgacgccgaaaccggtaaatatcatgtgaatcaatataccggcgatgaaagccgcacccgcgtcactcaatgggaaacgctcgactgggtacaggaagtgcaaaaacgcggtgccggagaaatcgtcctcaatatgatgaatcaggacggcgtgcgtaacggttacgacctcgaacaactgaaaaaagtgcgtgaagtttgccacgtcccgctgattgcctccggtggcgcgggcaccatggaacacttcctcgaagccttccgcgatgccgacgttgacggcgcgctggcagcttccgtattccacaaacaaataatcaatattggtgaattaaaagcgtacctggcaacacagggcgtggagatcaggatatgttaacagaacaacaacgtcgcgaactggactgggaaaaaaccgacggacttatgccggtgattgtgcaacacgcggtatccggcgaagtgctaatgctgggctatatgaacccggaagccttagacaaaaccctcgaaagcggcaaagtcaccttcttcagccgcactaaacagcgactgtggaccaaaggcgaaacgagcggcaatttcctcaacgtagtgagtattgccccggactgcgacaacgacacgttactggtgctggcgaatcccatcggcccgacctgccacaaaggcaccagcagttgcttcggcgacaccgctcaccagtggctgttcctgtatcaactggaacaactgctcgccgagcgcaaatctgccgatccggaaacctcctacaccgccaaactgtatgccagcggcaccaaacgcattgcgcagaaagtgggtgaagaaggcgtggaaaccgcgctggcagcaacggtacatgaccgctttgagctgaccaacgaggcgtctgatttgatgtatcacctgctggtgttgttgcaggatcaggggctggatttaacgacggtaattgagaacctgcgtaaacggcatcagtgagttgcggggtaagcggatgcgatattgttgccgcatccggcaaaaaaacgggcaaggtgtcaccaccctgccctttttctttaaaaccgaaaagattacttcgcgttgtaattgcgtagagcattacgccccagcacaatccccgcgccaaccatgccacccagcagcaccgccagaatcaaggtaattgcctttttcgggctatcacgacgaataggtaacatcggtttcatcacataacggtaagcatgaatatcaagatcatcaacttttaagctttcgatatccagcaggttttgacgagtctgatagtagtttgggctgaacaccaacggacgggtcgcctcatgcttaatcatgctctccagcgcttcgctccccaaaaggaacaacgtatcttgtgtgatatcttcgccagtctgttgaatctgcggttttgtcacctgcgcctgattcgcatactgcaacgcttcctgaatctgacggatacgcagatctttctgctcctgcgcgactacttcctgcgttcttaaagagtcctgcaagtttttccgtcccagagcaatgttgtctttgagatccttttctagctcttgattcactttatcgtcaacttgctgaatgtattgggccaacttcatttgtgcgccctctgcagtttgcccaacataagaaacagtcaatggtaattgctggttcttaacagaaggttcgatggtaagtttttctcgttcttcctgattatccagcgtttctgctaatgcagagaaggcagaactgaagcgaccaattaacgtctcctgcaaatcgcttactttcggtgcagcctgaccatagataacattcatggcattgttatagccagcaatttgccccacgtcgggctgagtgataattgctgtactcgtccatttctccttcgctactgccaaatatccaatagccagggcaatagccacaatgacggaaatgatgattgtcatcttgccacgccacaactgcactagtaaatcaatcaaatcaatctgttccgggtcatggttttgcccagaaacattattattttctactctcatcattaccctaactgacggaaatttccaagtccgcatagtttagcgataatcctcgtgaatgctataggataagtgataaaaataatgaattgttgtgtaagtaacaaaagacaatcagggcgtaaatagccctgataacaagatgttagtcgctgccaaagagatcgcgggtgtataccttatctgccacatccttaagctcttctgccattcggttagagataatgacgtcggcttgttgtttgaaggtggcgagatcacgttccaggcgagagttgaagaaactgtcttctttcatcactggctcgtagatgatcacttcaacacctttcgccttgatacgtttcataatcccctgaatagaagacgcacggaagttatcactaccgctcttcataatcagacgataaatacccaccacttgcggcttgcgactcaaaatggcatcggcaataaaatctttacgcgtgcggttagcatcgacaattgcgctgatcaggttattcggcacagactggtagttcgccagtaactgcttggtatctttcggcagacaataaccaccataaccaaagctcggattgttgtaatggttgccaatacgtgggtcgagacaaacgccttcgattatttgacgggaattcagacctaaactttctgcatagctatccagttcgttaaagtacgccacgcgcatcgccaggtaggtgtttgcaaaaagtttaatcgcttctgcttcagtggagtcggtaaacagcatcgggatattttgcttaatcgcgccttcctgtaacagagcagcgaaacgttctgcgcgttcactacgctcaccgatgacaatacgactaggatggagattatcgtaaagggctttaccctcacggagaaattccggggagaatataatattttcagtgcgatatttcttatgcatcgctgcggtaaaaccaacgggaaccgtacttttgatgaccataaccgcataaggatttatctcaactacgtctttaattacactttctacactggatgtattgaaataattagttttaggatcatagtcggttggagtggcgatgatgacataatcagcatcccggtaggcttcatttttatctaatgtggcattaaagtgtattttatcactttgcaaaaactgctgaatttccttatcaacaataggagatatccgatcattcagcatagcaacgcgactcggtaaaatatctaatgccacaacctcatgattttgtgcgattagaagcccgttactcaagcctacatagccagtaccggaaatggtgattttcatttcatgctctcagaattaacttaactgtgaatcatgatgtttttagcatcctgataagagctaaaagttttaacgctacgttgttcgatggtcaacgcaacgaaaaacaattcagattttctttataagaatagctgatatttattaagttaatattaagcagtgaaatttagtctataagatatttggcaaaaaaaagcccggtgcaatatacgccgggcctcaattttattgttggttaaatcagattaatccagccattcggtatggaacacaccttctttatcaatacgcttataagtatgcgcaccaaaatagtcacgctgtgcctggatcaggttcgcaggcagaacagcagcacggtagctgtcgtaataggcaaccgctgcggagaaggtcggaaccggaataccgttctgtactgcataagcaacgacatcacgcagcgcctgctggtagtcatcggcaatttgcttgaagtacggagccagcaacaggttagcgatctgtggattttcggcataagcatcggtgattttctgcaggaactgcgcacggatgatgcagccagcacggaaaatcttcgcgatttcgccgtagttcagatcccagttgtactcttcagacgcagcacgcagctgagagaagccctgggcgtaagaaacgattttgcccagatacagcgcacgacgaactttttcgatgaactcagccttgtcgcctgctggctgtgcttgcggaccagagagaactttagatgcggcaacacgctgatctttcagagaagagatataacgtgcaaacacagactcggtaatcaggctcagcggttcgccgagatccagcgcgctctggctggtccatttaccggtacctttgttagccgcttcatccaggatcacatcaaccaggtagttaccgtcttcatcttttttggtgaagatatctttggtgatgtcgatcaggtaactgctcagttcaccgttattccactcggtaaaggtctgcgccagttcttcgttggtgaggttcaggccacctttaagcagagaataggcttcagcaatcagctgcatatcgccgtattcaataccgttgtgaaccatcttcacatagtgacctgcgccatcggcaccaatataggtaacgcatggttcaccgtcttcagctacggcggcgattttggtcaggatcggtgctaccaattcataggcttctttctggccaccaggcataatagaaggacctttcagcgccccctcttcaccgccagaaacaccggtaccgatgaagttaaagccctctgcactaagctcacgattacgacgaatagtgtcctggaagaaggtgttaccaccatcaatgatgatgtctcctttatcgagatatggtttgagggaatcaatagcagcatccgtgcctgcacctgctttcaccattaacaggatgcgacgaggcgtttccagagattcgacaaactctttcaccgtatagtaaggaaccagtttcttgcctggattttcggcaatcacttcttccgtcttctcacgggaacggttgaaaatagagacggtataaccacggctttcgatgttgagcgcaaggttgcgtcccatcactgccataccgactacgccgatctgttgcttggacattacatactcctgtcaggtgtgatcaccgcgctgaatgctcgcggcctggaatgttcgcaaataagtatacaaagtacttattaaagtataaatagcttatccatgcttatatgcttacggctttatatgtctccacatgcgatatttcttaaataatgttttattattaccacttttaattcagggataatgtgaggttattaccctcaaataatatgagataaatagtgctgcaacattgcatttttgccccgatttatccatgatcgaattgtgacatttgtcatacaacgaataggttttgtacttactatggaatggattgccgatccgtctatctgggccgggttaatcacgctgattgtgatcgaactggtcctcggcattgataacctggtctttattgccatcctcgccgaaaaactaccgccgaagcagcgtgaccgcgcacgggttaccgggctgctgctggcaatgttaatgcgcctgttactgctggcgagtatctcctggctggtcaccctgactcaaccgctgttcagcttccgcagctttacctttagcgcccgcgacttaatcatgctgtttggtggtttcttcctgttgttcaaagccacgatggagctgaacgaacggctggaagggaaagacagcaataatcccacacaacgcaaaggtgcgaagttctggggcgtggtgacgcaaattgtggtactggacgccattttcagtctcgacagtgtgattaccgccgtcgggatggtcgaccatttactggtcatgatggccgccgtggttatcgctatcagcctgatgttgatggccagcaagccgttaacgcaatttgttaacagtcacccgacgatcgttattctctgcttaagcttcctgttgatgattggctttagcctggtggcagaaggtttcggcttcgtcattccgaaaggctacctgtacgctgccattggtttcagcgtgatgatcgaggcgctcaatcagttggctatctttaaccggcgacgttttctttccgctaaccagacgctgcgccagcggactaccgaagcggtaatgcgcctgcttagcgggcaaaaagaagatgcggaactggacgccgaaaccgcgtccatgctggtggatcatggtaaccagcagatctttaatccgcaggaacggcggatgattgagcgggtacttaatcttaaccagcgtaccgtcagcagcattatgacgagccgccacgatattgagcatatcgatctcaacgcgccggaagaagaaatccgccagttgctggagcgaaatcagcatacgcggctggtggttaccgacggtgatgacgcagaagatttgctcggtgttgttcacgttatcgacctgctacaacagtctctgcgcggcgaaccgctcaacctgcgggtgttgattcgccagccgctggtgttcccggaaaccttgccgttgttacctgccctggagcagttccgtaatgcccgcacgcactttgcttttgtggtggatgagtttggcagcgtggaagggattgtgacattaagtgacgtcactgaaaccattgccggtaacttaccgaacgaagtggaagagatcgacgcccgccatgatattcagaagaatgcggacggttcctggacggcgaatggtcatatgccgctggaggatctggtgcaatatgtgccgctgccgctggatgaaaaacgtgaatatcacaccattgccgggctgttgatggagtatttgcagcgtattccaaaacctggcgaagaagttcaggtgggggattatttgcttaaaacgttgcaggtagaaagccatcgcgtgcagaaggtgcagattataccgctgcgtaaggatggcgagatggagtacgaggtgtgatggtatcggtcattttacccaatagccgaaaggaataagatgagggaaccgcgccatcggcgatttaccgccgggagcccgggttgccagggtggtggagattgagccaccctggcacgttcaccggcttgagcgttccatagtagcgaggaacatcaagtgaacggaacagccttcgatcttacatattcagaatataatgatgccgccacgaacgcctgatgcgacgctttacgcgtcttatcaggcctacaggactggtcacctggtaacttacatcttctccagcaacttcttcacatctttgccattacgggaatctttattccgctcggcccagtcattcaggcgacgtttcgcttcgtcctgtagatgtttgcgcagtaactgatccacttgcaggctgtaattgagttgctgccagttgccataaacccgcagcggtactggcgtttctttcaggaaatcaatcagtttgctttccccgttccagccacccacgacccgaatatcaaactgggtgtcgcaggtttgatctgccagattcaacatgccttcccctgtcagcgccagcacagggctttgaccttgcatgtcgtttaacgtcacgacgccatccttcaacgtcaaatcggtggtaaagcggtcaagccgcgtcacgttatcaaagttttcagcggccttcacatcaccgccattacgctctaccgcttgctgaatcatctgctggaagttcatcccttccatgcgcgtgtcggtcatttcgacatgtgcctgtccttgccagttgtggcggaatgcgtcggcatctatgtcagcaccggagaaatcaccagccagactcatttttccggtcaagctaatcggatagttaaacgccttcagaatggtaccaatctcaacgttttccagccgtggctggaagtttatccgcggatttatacttgtcgcgtccagcgtgcccggcagactaacctgtccaccgttaagtttgccctgcagttgagtaatttccagcaaaccgctcttgttggtcatttgcgtggcaacatctgtaaaattcattccgcgccagcgcacgttactggcctgcaacaaaatatcagccgtaaagccttgcagtccctgataggccggttcatcaatacggctagaaatgaccgggcgcggcaacgtactttggctctgcccctgctgcgcggcaccgttttcaccattcgcggtttcattaagcgggatgaggttgtcaagattcagttgcgggaattgcagcctcagctgccattccggtttctctgtcagcgtaacctgtgcttgcccgcttagcgtactatcattggcggtcaaactaatttggttaaaactaaggcgtttatgactctcctgccactgggcctggaaactcccctgcccctgaataccttgttttggtaaatcggcaccctgcaactgccagttaatttgttcaatagccgccgttaaatcatgcggataatcagaagcatctaccgtaccgttaagggatatcgtgagatcgcgctgatcgcgattaacccgcccggagaactcaaaactaccacgatgttggggatcttgttccatttgcaggcgaatattgcggattgtcacctgctcgtcatcttcatgctggaacaccagcacgctgtccgccaccttaagactggatatatcaaagctccatccgcgatcgtcactcagatccggcaaggtattgtcgcgcggtgcaaccggagcgtcttcactgcgcaccgcttccgtctgcggcgtcagttggatcactgccccttttagcatcacctgcttaacgctcagttgatgactcagtagtggtaaaagcgccacgtccagacgcatgttgtcggcgcgaaccagtggctggcttgcgccctgggcggtgagagacattcgcccggagaggatactaagctgcggccagacgtgccaacgcagtggcccgtcgagctgcaattgataaccgctacgtgcagcaacttgcttgaccatatagtcgcggaaatcattcggattcaccagcaacactaacgcagataacccggccaccagcacgaccaggagtatcatcagcgtcgtcagaaatcgtctcatggtatcctcaatgggcctgaattagtctttatcgattcggctggctaccgcgccctgctggttgcgatatttcgcatcttcacggcggttgtaaggtcgcaccgccgggccggaaagcggctcaaagctcagcgcaccaattaacatgcccggacgcagcgccagcggcagcttaccggagttgtagaactccagcacaatgcaaccagaccagcccggatcgatgcggtgcgcggtgacgtgcaccatcagccccagacgcgccagactggaacgcccgtccagccagcccaccagatcggctggcagcgtcacgctctccagcgtcaccgccagcgccagctctcctgggtgaagatagaacgcctcgccctcgtcgagaacgatctcatcgctcatcacgcggtcaagcgcggcgctcacttcatctttgggaccgctcagatcgataaacgctgccgtgtgaccacggaaggtacgaaatttattgcccaggcgtacatccaccgtcgcgccgttaatacgctccactggcggacgtgggttgatgctcaaacggccttcatcaagccaggcttcaatatctcggtcacacagacgcatggcattttctcctttcgcgcatcactcccttaacgccaattacgtcaagggcatactaggttatcactgaacggtacacaatttatcaagcttattcaaagaactgacttattttcgctttcaatatatcgatcgcgatgcggtttttcccgccgcgcggcacgataatgtccgcatattgtttagaaggctcaatgaattgcaggaacatcgggcgcacggttttttgatattgcgccatcacactatccatactacgcccacgctcgttaacgtcacgcttgatgcggcgcatcaggcagatatccagcggggtatcaacgaaaatggagaagttaagttcgtcacgcaaacgcgcatccgtcagcaacaaaatgccttcgagaatgatgaccttcttcggctcaaccgtcaccgtttctttcatacgcgtatgttcaacatagctgtaaaccggcaggtcaattgcgctgccgcgtttcaacgcttgtaaatgctcaagcagcagactgtgatccatcgcgctgggatggtcgtagttggtcttaacgcgttcttccatgctcagatggctttgatctttgtaatagcagtcttcgggaattacgccgatgtgttcatcaccgacttgctcacgcaattcacgataaagggtactggcaataagactcttgccggaagcgcttgcgccagcgataccgataatgacgcactgatgagactgatcagtcatatatttagcgacctgattaacctggatgttaggaagggggcgacgaagcgccaaacgcggcaattatagggatttcatccgtctgataccagtcgaatagcgttgccgcgcgctcagagttaattgttgacaaagaattcccgggggcaaattacgttgatcagttttatgtaaggtaaaaaatgttaaacgcagttgcgcaaattatccgcctttacgtcactttatgagcaattcgcatataaaatgtaaaacttttgtactagcataaacacagaaacgaatactggcgaccaggtcttgcggataaagcggtaatgagcaaacaaagtcagcatgtattaattgccctgccccacccgctgcttcacctggtcagtttaggtttagtcagctttatctttacccttttcagccttgagcttagccagtttggcacccaactcgccccactgtggttcccgacgtccatcatgatggtggcgttttatcgccatgccgggcgcatgtggccgggaattgcgctgagctgtagcctgggaaatatcgccgcatccatcctgcttttttccaccagcagcctgaacatgacctggacgaccatcaatattgttgaagccgtggtcggggcagtgctgctacgtaaattgctgccgtggtataaccccttgcaaaatctggctgactggctgcgtctggcactcggcagcgccattgttccgcctctgttggggggtgttctggttgtcctgctgacgcccggagacgatcctctcagggcatttttgatatgggtactgagtgaatccatcggcgctctggcactggtgccgctgggattgttatttaaaccacactatctgctgcgccatcgcaacccacggttgctttttgagagcctgctcacgttagccatcacactgacgttaagctggcttagcatgctgtatctgccgtggccttttactttcattattgtgctgttgatgtggagcgccgtgcgtctgccacgaatggaagcctttttgatcttccttaccacggtgatgatggtgagcctgatgatggccgcggatccctccctgcttgctacgccgcgtacgtacctgatgagccatatgccgtggctaccgtttttgctgatcctgctgcccgccaacatcatgaccatggtgatgtatgcctttcgtgcggaacgcaaacacatttccgaaagcgaaacccactttcggaacgcgatggaatattccgctatcggtatggcgttagtgggcaccgagggacaatggctgcaaaccaacaaagcgctctgccagtttctcgggtacagtcaggaagagctgcgcggactcacctttcagcaactgacctggccggaggatctcaataaagatctccaacaggttgaaaagctgataagcggtgaaataaacacctatagtatggaaaaacgctactacaaccgcaatggcgatgttgtctgggcgttgcttgccgtcagtctggtgcgccacacggatggcacgccgctctattttatcgctcagattgaagacattaacgagctaaaacgcaccgaacaggtcaatcagcaactgatggagcgcatcactctggctaacgaagcgggcgggattggcatctgggagtgggagttgaagccgaatatttttagctgggataagcggatgttcgagctgtatgaaattcctccacatatcaaaccgaactggcaggtgtggtacgagtgcgtgctgccggaagatcgccagcatgccgaaaaagtgattcgtgatagcttgcaaagtcgcagcccctttaaactggaatttcgcattaccgtaaaagacggtattcgccatatccgcgccctcgccaaccgggtactgaataaagaaggcgaagtcgaacgtctcctcggcatcaatatggatatgaccgaagtgaaacagcttaacgaggcattgtttcaggaaaaagagcgcctgcacattacgcttgattccatcggtgaagccgtggtctgtattgatatggcgatgaaaattacctttatgaatccagtggcggagaagatgagcggctggacgcaggaagaagcgttaggtgttccgctcctgacggtgttgcatattacttttggcgacaacggaccattaatggagaacatttacagtgccgacaccagtcgttccgcgatcgagcaagatgtggtgttgcactgtcggagcggcggcagttacgacgtgcattacagtattacgccgttaagtactctggacggcagcaatattggtagcgttctggtgattcaggacgttaccgaaagtcgcaaaatgctgcgccagctgagctacagcgcctcccatgatgcactgacgcatctcgccaaccgcgccagttttgagaaacaactgcgtatcctgctgcaaacggtaaacagtacacatcagcgacatgccctggtgtttatcgatcttgatcgctttaaagcggtgaatgacagcgccgggcatgcggcgggtgacgctttgctgcgcgaactggcgagcttaatgctgagtatgctgcgttccagcgacgtgctggcgcgactcggtggggatgaatttggtctgctgctaccagactgtaatgttgaaagcgcgcgttttatcgctacacgcattatcagtgccgtgaatgactatcactttatatgggaaggccgtgtgcatcgggtaggtgccagtgccgggattaccttgattgatgacaacaatcatcaggcggcagaagtgatgagccaggctgatatcgcctgttatgcctccaaaaatggtggccggggccgggtgacggtttacgaaccgcagcaagctgccgcacatagcgaacgggcggcgatgagccttgatgaacagtggcggatgattaaagagaatcagttgatgatgctcgcccacggtgtcgctagcccacggatcccggaagcgcgtaatttgtggctgattagtcttaagctctggagttgcgaaggcgagattattgatgaacaaacatttcgtcgtagcttcagcgatccggcgcttagccatgctcttgaccgccgggtattccacgaatttttccagcaggccgcaaaagcggttgccagtaaaggcataagcatctccctccccctttccgttgccggtttgagtagcgccacgctggtgaatgatctgcttgagcagctggaaaatagccctctaccaccacggttattacatctgattattccggctgaagcgattttagatcacgcagaaagcgtgcaaaaactgcggctggcgggatgtcggatagtgctcagccaggtgggccgcgatctgcaaatcttcaacagcctgaaagcgaatatggcagattacctgctacttgatggtgagttatgcgccaacgtgcagggtaatttgatggatgagatgctgattacgattattcaggggcacgctcagcgactcgggatgaaaaccatcgccgggccagtcgttttacccttagtgatggatacgctttctggcatcggcgtcgatctgatttatggtgaggtgattgccgatgcccaaccgctggatttgctggtgaatagtagttatttcgcgattaactgaggcgtgcttccccatcgcctgatgcgacgctaacgcgtcttatcatgcctacaaatcgctcattccccaggccggataaggcgctcgcaccgcatccggcgaccaacgtcatgcttcgtctggttgccagccttccgtataccagatatgcaacagcgcataagaacgccagggcttccagcgctcggcataacggcggatttgcgccggtgtcattcccggaaatcgctgtttaatcagataatcatccggcaggaaaacatctttcgcctgccagccacgcaaagcaaaataattcgccgtccagcgcccgatacccggaaaagtttgcagcgttttcatcgcctgctccacatcgcccggtattgtcattggtaaggtgccctccagcgccgcatttgccagatgaatcagcgcctctgcccgtttcaacggcatacctaacgcttttaatgcctgcgggtctgctgctgccagccgctgaggcgtcgggaagcagatatactccggaaaatcatccagccgttcgccataaagctgtgccactctggcggtcaattttgccgccatcgccacgctcaccagttggcctaaaatcgcccgcacgccctgctcaaaagcatcaacacagccgggtaaacgcaatccgggccgcgccgcgcctaacctgcccaacgcaccgttaacaatttgtgggttacattgcagatcaaacaggcggctcattttcgccagacactctgcggcaacaggttctaaacctgcacttaaatttatgtgcagagtatggcgggctatatccggaatagcagtcaccacgccgcgatattcgcccaccgccagactacgggcataataactgtccgcgaccgtttccacactgctcaccgcacgggcggcgagaaatcccaacatccagctccagtcatacggcggctgccagttcagggtatacatcgcatctccttattcatccgctttcagcataaacgttattcagacgctgcgctttgctttcatattccggttgtcgcgacggcaacatttcgctaaagtcacgccccttcttcaccggcatggggattatttcgtgtttattggttttgattacggtacagcaaactgtagtgtggcggtcatgcgtgacggtaaaccgcatttgctaaaaatggaaaacgacagcacgctgctgcctagtatgctttgcgcgccaacgcgtgaagcggtaagcgaatggctgtaccgccatcatgatgttccggcagacgacgatgaaacgcaggcgctgttacgtcgggcgattcgttataaccgcgaagaagatatcgatgttacggcgaaaagcgtgcagttcggtctttccagtctggcacagtacattgatgatccagaagaagtgtggtttgtgaaaagtccaaaaagcttcctcggtgccagcggcttaaaaccgcagcaggtagcgctgtttgaggatctggtctgcgcaatgatgttgcacattcgccagcaggcgcaggcacagctgccagaagcgattactcaggcggtgattggtcgtccgatcaacttccaggggctgggcggtgatgaagcaaacacccaggcgcaagggattctggaacgcgcggcgaagcgtgccggattcagggacgtggtattccagtacgagccggtcgcggctgggctggattacgaagccaccttgcaggaagaaaaacgggtgctggtggtggatatcggcggtggtacgactgactgtagtttgctgctgatggggccgcagtggcgtagccgtctcgatcgtgaagccagcctgctgggtcacagtggttgccgtattggcggtaacgatctggatatcgcgctggcgtttaaaaacctgatgccactgctgggtatgggtggcgaaaccgaaaaaggcatcgccctgccgatcctgccgtggtggaatgcggttgccatcaacgacgtacctgcgcagagtgatttctacagtagtgccaacggtcgtctgcttaacgatctggtacgcgatgcccgcgaaccggaaaaagtggccctgttacagaaagtctggcgtcagcgtttaagctatcgcctggtgcgtagcgcagaagagtgcaaaattgctcttagtagcgtagcggaaacccgcgccagtctgccgtttatcagcaatgaactggctacgctgattagccagcgagggctggaaagcgccctcagccagccactgacgcggattctggaacaggtgcaactggccctggataacgcccaggaaaaaccggacgttatctacctgaccggcggtagcgcccgttctccgctgattaaaaaagcgctggcagaacagttgccgggcattccgattgcaggcggcgatgactttggctccgtcaccgccgggctggcacgctgggcggaagtggtgtttcgttaattgaaaaatggctcagcagcggcttaaatctgcctgcgcctgagccagtttttctgctgcctgacgtaacggttccatcaacggcatggtccgtgctggagcatgaaggcggaatcgctgcaactctgtcgcgccgactgtcaacgcgctttccagccgatgtcgtttggcggtcattttcgccattaccgcttgtctgtctgctggcgttatcgcttcattcggcctgaacacaaaacggcgttcacagctcgctttccagtcgataaccgcctgggtcagatggtcgccaaaccctttcacttgcttaacgccacgacgggtaacatctgcggctgtttcaataccaaaagaccgtaacgccgctttacgcgcagggccaacgccgggaatagaggcaacatcaataaaaaatccctccagaaacttctgcttctgccgttcccttgcagtgtcatgaagtgctgccagagcgcgtttctcttcttccggtaacccgagaatttcgtccttcattttttcgagcatcgtccgtttggcgataaaaccttccaggccgcctacctgctggatctggcggactaaatggtcatagtccattttcgcacgattaaatgcctcacggcgttgctgaacttctgctttgtacgctttgcttgtcagactgccaataatccagatagccgccagcacaggaaccaaaataatataacgcggttctgcctgaaggccgcaaagcagcaggcttaatgcactcagtgcgatctcaagcagaatgatgtattcgcgccgtaacaggcctaaaggaagcggcctgccagtcggttggaaatgatcgggtaatggcagttgcaatgctggcggtgctacactcgccatcaccatcgcccagactttcgccagcacaaaattcccgccggtggtaatgacctcttcgccgagatcaataaaatagataacaccttgattatccagcgcacaccacgggcagtcagtcaaatgagcggggtaaacatgcattgcactaacgatacatttctttaactgttggcgtagagagtccagtgccgctacccacgctttagccgtcggacgcccggttgccacgccactttccgtgaatgcctgctgaaacatggcttcaacatcactcggtaacatgcttagcggaatagatcgtggcggcggttttaaaccacgtcgctgattatcactcgcgtaggcataacggaaatgggtaatatccgtctccagcgcattacccgcatcagagataagcggcacaccagaataaggatgccgcccaccaaacaagacgtgaaaaattagcaacgcaaggccaaaattatcgtgattttctgtgcgttcaaaaccgacaaaacttggcaaggtttgtagctctggcggcgtaaaatggctcacgccgacttcgcataaatgcagtgtgccattggcgttaatttgaaaggagtcgctatcaatcagtaccactttgctgtcgcgacctaccataaaactgttctggtttacgtcacccacgacgtgcccgtgctcgtgaaccgtagcaaaagaactagcaatattgcgcgcaacatagagtagaaaatcccacgcacaatgagggtaactctggcgacgatgtgccgggctatagatcatatgaatcggttctttaccagaaacttttggcatcataaaaccgataacttttccgcctcgtccaccgtgaagcgttgcctgcggccaggcgacataattcaacaactgcgcgtcagctgtcgcagccataaaggcaagtttgtcctgttttaaggcgggtggcggcgtgtgataaatcttggcgacgctatcgacaaactcctcgatatcataaaccgcgccttcaccacctttgcccagttcacggccaagagtggtcaattcacctgtgcttgtaaatacttttatatttgttttcataatatttcgcgggtagttatattatatttcaatgaataataacaactaaccattaaaattatttctatatggggaaaacccactcaagaataaaaatgataatgcaattttatcaggatacaattcaatttcggcctgataatgattaacttccacaggtttttgctaactttgactacaaagggattctggagaaaaaatgaaaaagatattacttatgttgagtctgctattttttactaccgcgggctttagtgaagttagcgatacgttagtgacgggaggttatgataaacaagcgatgtctgacgcgattaaacatgcgcggaaagaaaccgataaattcatcgaggttatgaataaaaaagatgccgatactttcgcagtcaaagccccgataaccgatcacggaagaaccgagcatttctggcttacggatgtcacttattctaacggcatgtttattggcgtaatcagcaatgaccctggtattgttacaaacgtagaatatggccaggagtggaaaatcaagaaagaagatattagtgactggatgtatacgcgcggggataaaatttacggcggttataccattgatcctttattggtcacctatccaaaagaagaagccgacgagctaagagcaaaattagttcgctaatcagccgttatatttattgtttaaactggcggttgaattgttgtcttcaaccgccatgagaaactcactctgcccacagcgccagtgccaacgttttatcatcatccgtacgctcgtttaccgccgggctggacaaaaactgctttaacaattcaggtaataaatcgagttgttcctgcgttgctgccgccagtccattgaaaaacggggtaaagaaaggcacatgaggagaattatccagcatatttaacgccagtcgctggataccatccgtaaatgctgcaactttgtgcgcacgcccagtgctggtgaaagtttccagtctggaaacggcatcttcgtcggtaatgaagtgcgtcatgttggcatattcacccgccatcggcgtgagaggcaattgcagaccgtgacccaaatctaccaccacgccgccatcgccaatctgcataatcaaggtgccgtcagggctactaatcagtcccagaaatgtgcaggcaaaatcgcgaaccgctaattctttggcttccgcctcggcaaaaagtcgttgacgaatggtcagtaccatatttgtggcgaggacatcattaagccccaattccccgccctgcactttttggctcatataagccatcgcttcattgacggcgagcatcgcgccttcgccaccctggctgacactgcctgcgccatcagcgacaaatacgctcaataatggctgctggtcatttaaccaggcaatctgcatctggcaggcatcctgacaaggcaagtccgcgctgatgtggctcgttccaacggtacttgcatagaccagacgccagctcacacactcgtccagccttttggcgcttccagcacaacttccgttcccggcgtggagcgggaaacgctacgcaggctactggataaccagctaaacagttcacggaattgtaatccttgcagaggcaaaggctgacgaacgctaatttgtgccagcgtcttcatatccgccccctgaacaccgatggaaaagaaagcaaaccttttatcttcttccccccgaaacactttgttggctgcagcctgccactcatcggttggtgcaccatcggtaatcaggaaaatccacgggcgataatagctaataccatttgcacgatactcacgtttccgctcctctaccatatccagggctttggtaatggccgcacccattggtgtatcgccctgggcaaacaggatgggcggaaaaaaattagcggcgctggtaaagggttgttccacatgcaccgggccgaacgtcacaatgccgagttccactctttttaaagccagcggatcagcaagcagttcatcacgaaaggtaaccaatccggcgttaagttcattaataggtctaccgttcatagaaccagaaacatccagcagcaaaatgcaggggcaacgtggttccgggttactggcaaaatcgctggtggcaaacgtgatttgttcgctcataagaaatcctttcttagagaattatcgaggtccggtatcataccgactgcaataatgaaataagagcaaacgaagaaactttcagaattaggcccggcggcgcagaaaattttgctattcgcctcgcaagaacggagagccgtcgattgacactaagggcggagtgacataatttcaggagtgagggttagggagaggtttccccctccccctggtgttcttagtaagcctggaagctaatcactaagagtatcaccagtatgatgacgtgcttcatcataaccctttccttattaaaagccctcttctccgggagaggctttcccgtttcagcgtcccgctgaaatcatcggcttacctcctttcgccctgaatgcagtctatcgctaacgcgtgaataaaatagtttcctctgtgattattgcgtaacgactcgcaaagaatatttgctggcaggatcgcagactacaaagcctgcggattgacaatcttatcgtgaaggcatactttcaggagtgagggtagagcggggtttcccccgccctggtagtcttagtaagcggggaagcttatgactaagagcaccacgatgatgagtagcttcatcatgaccctttccttatttatggccccttcctcgggaggggctttcccgtttcagcgtcccgctgaaatcgtcggcttacctcctttcgccatgcaagcagtctatcgctaacgcgtagataaaatagtttcctgtgttattactggatgcgtgctcgcaaatgtgcccgtcattcagacgattccagacagtgtttcataattcctccatttttctcccttattggctggctacactagtatcattccgcgaaacgtttcaggaagagaaactcttaacgatgaaaggtagttataaatcccgttgggtaatcgtaatcgtggtggttatcgccgccatcgccgcattctggttctggcaaggccgcaatgactcccggagtgcagccccaggggcgacgaaacaagcgcagcaaagcccagcgggtggtcgacgtggtatgcgttccggcccattagccccggttcaggcggcgaccgccgtagaacaggcagttccgcgttacctcaccgggcttggcaccattaccgccgctaataccgttacggtgcgcagccgcgtggacggccaactgatagcgttacatttccaggaaggccagcaggtcaaagcaggcgatttactggcagaaattgaccccagccagttcaaagttgcattagcacaagcccagggccaactggcaaaagataaagccacgcttgccaacgcccgccgtgacctggcgcgttatcaacaactggcaaaaaccaatctcgtttcccgccaggagctggatgcccaacaggcgctggtcagtgaaaccgaaggcaccattaaggctgatgaagcaagcgttgccagcgcgcagctgcaactcgactggagccggattaccgcaccagtcgatggtcgcgttggtctcaagcaggttgatgttggtaaccaaatctccagtggtgataccaccgggatcgtggtgatcacccagacgcatcctatcgatttagtctttaccctgccggaaagcgatatcgctaccgtagtgcaggcgcagaaagccggaaaaccgctggtggtagaagcctgggatcgcaccaacagcaagaaattaagtgaaggcacgctgttaagtctagataaccaaatcgatgccactaccggtacgattaaagtgaaagcacgctttaataatcaggatgatgcgctgtttcccaatcagtttgttaacgcgcgcatgttagtcgacaccgaacaaaacgccgtagtgatcccaacagccgccctgcaaatgggcaatgaaggccattttgtctgggtgctgaatagcgaaaacaaggtcagcaaacatctggtgacgccgggcattcaggacagtcagaaagtggtgatccgtgcaggtatttctgcgggcgatcgcgtggtgacagacggcattgatcgcctgaccgaaggggcgaaagtggaagtggtggaagcccagagcgccactactccggaagagaaagccaccagccgcgaatacgcgaaaaaaggagcacgctcctgatgcaggtgttacccccgagcagcacaggcggcccgagccgcctgtttattatgcgtcctgtggccaccacgctgctgatggtggcgatcttactcgccgggattatcggttatcgcgccctgcccgttagcgcgctgccggaagtggactatccgaccattcaggtggtcacgctctacccaggtgccagcccggatgtcatgacctctgccgttaccgcgccgctagaacgccagttcgggcagatgtctggcctgaaacagatgagcagccaaagttccggcggtgcgagtgttatcactttgcagttccagctaacattaccgctcgatgtcgccgagcaggaagtgcaggccgcgattaacgctgcgaccaacttgttgccgagcgatctgcctaacccgccggtttacagcaaagtgaacccggcagatccgccgatcatgacgctcgccgtcaccagtaccgccatgccgatgacgcaagtggaagatatggtggaaacccgcgtcgcgcagaaaatcagccagatttccggcgtcggcctggtgacgctttccggcggtcagcgtccggctgttcgcgtcaaacttaacgctcaggcgattgccgccctcggcctgaccagcgaaaccgtgcgcaccgccattaccggcgctaacgttaacagcgcaaaaggtagcctcgacggcccttcccgtgcggtcacgctttccgcgaacgaccagatgcaatccgccgaagagtatcgccagctaatcatcgcctaccagaacggcgcgccaattcgtctgggcgatgtcgcaactgtagagcaaggtgcagaaaacagctggctcggcgcgtgggcgaacaaagaacaggccattgtgatgaatgttcagcgccagcccggtgctaacattatctccaccgccgacagcattcggcagatgctgccacagctcactgagagtctgccgaaaagcgtgaaggtgacagtgctttccgatcgcaccaccaatatccgcgcatccgtcgatgatactcagtttgaattgatgatggctatcgcgctggtagtcatgattatctacctgtttttgcgcaatattccggcgaccatcattcccggtgttgctgtaccgctgagcttaatcggcactttcgcggttatggtgtttctcgattttagtatcaataacctgacactgatggcgttaactatcgccaccggattcgtggtcgatgacgccatcgtggtgatcgaaaacatttcccgctatatcgaaaaaggcgaaaaaccgttggcggcggcgctcaagggcgcaggtgaaatcggctttaccattatcagcctgaccttcagtctgattgcggtgttgatcccactgctgtttatgggcgatatcgtcgggcgactgttccgcgaatttgctattaccctggcggtagcgattttgatcagtgcggtggtgagcctgaccctgacaccgatgatgtgcgcgcggatgctcagccaggagagcttgcgtaaacagaaccgcttctcccgtgccagcgaaaaaatgttcgacaggataatcgccgcctatggtcgtggactggcgaaagtgctgaatcatccgtggctgaccttaagcgtggcactcagcacgctgctgcttagcgtgctgctgtgggtgttcattccgaaaggtttcttcccggtacaggacaatggcattattcagggcactttgcaggcaccgcaatccagctcctttgccaatatggcccagcgacaacgccaggtcgcggacgtgattttgcaggatccggcagtgcaaagcctgaccagttttgttggcgttgatggcactaacccgagcctgaacagtgcacgtttacaaatcaacctcaaaccgttggatgaacgtgatgatcgggtgcaaaaagtcatcgcccgtctgcaaacggcggtagataaagtgccgggcgtcgatctcttcctgcaaccaacgcaggatctgactattgatactcaggtcagccgcacccagtaccagtttaccttgcaggccacgagtctggatgcgctcagtacctgggtgccacagttgatggaaaaactccagcaactgccacagctttctgatgtctccagcgactggcaggacaaagggctggtggcgtatgtcaatgttgatcgcgacagcgccagccgtctggggatcagcatggcggatgtcgataacgccctgtacaacgcgtttggtcagcggctgatttccactatttatactcaggccaaccagtatcgcgtggtgctggagcacaacaccgaaaataccccaggcctcgcggcgctggataccattcgcctgaccagcagcgacggcggcgtggtgccgctaagcagtattgccaaaattgagcagcgttttgcgccgctctccatcaaccatctggatcagttcccggtaacgaccatctcctttaacgtgccggataactatagcctgggcgatgcggtgcaggcgattatggacaccgaaaagacgctgaatctgccggtggatatcaccacgcagttccagggcagcaccctcgccttccagagcgcgctgggcagcactgtctggctgattgtcgcggcggtggtggcgatgtatatcgtgctcggcattctgtacgagagctttattcacccgatcaccattctcagcacgctacccaccgcaggggttggcgcactgctggcgttgctgattgctggtagcgaactggatgtgattgcgattatcggcattattttgctgatcggtatcgtgaagaagaacgccatcatgatgatcgacttcgcgctggctgctgagcgcgagcaaggcatgagcccgcgcgaggcaatctaccaggcttgtctgttgcgttttcgtccgatcctgatgaccactctggcggctctgcttggcgcgctgccgctgatgttgagtaccggggtcggcgcggaactgcgtcgtccgttaggtatcggcatggtcggcggtctgattgtcagccaggtgctgacgctgtttaccacgccggtgatttatttgctgttcgaccgcctggcattgtggaccaaaagccgctttgcccgtcatgaagaggaggcgtaagtgaagttttttgccctcttcatttaccgcccggtggcgacgattttactgagcgttgccattaccctgtgcggcatactgggcttccgtatgctgccggtcgccccgctgccgcaggtcgattttccggtgattatcgtcagcgccagcctgcccggtgcgagtccagaaacaatggcgtcttccgttgccacgccgctggagcgcagtcttgggcgcattgccggagtcagtgaaatgacctccagcagtagcctcggcagcacgcgtattattttgcagtttgattttgaccgggatatcaacggcgcagcgcgtgatgtgcaggcggcgatcaacgctgcacaaagtttgctgcccagtgggatgcccagccgcccgacctatcgcaaagcgaacccgagcgatgcgccaattatgatcctcacgctgacgtccgatacttatagccagggtgaactgtacgatttcgccagcacgcagctggctccgacgattagccaaatcgacggtgttggtgatgtcgatgtcggaggcagcagtctgcccgccgtacgcgtcgggctgaatccgcaggcgctgtttaatcagggcgtgagcctggacgacgtacgcaccgccgtcagcaatgccaacgtgcgtaaaccgcagggcgcgctggaagatggcactcaccgctggcagatccagaccaatgatgagctaaaaaccgccgctgaatatcagccgttgattattcactacaacaacggcggcgcggttcgtctgggcgatgtggcgacggtgaccgacagtgtgcaggatgtgcgcaacgccgggatgaccaacgccaaaccggctattttactgatgatccgcaaactgccggaagccaatattatccagacggttgacagcatccgggcaaaattaccggagttgcaggaaaccattccggcggcgattgatctgcaaattgcccaggatcgctcccccaccattcgcgccagcctggaagaagtcgagcaaacgctgattatcagcgtggcgctggtgattctggtggtgtttttattcctgcgcagcggtcgcgccactattattcccgccgttagcgtgccggttagcctgattggtacgtttgcggcgatgtacctgtgcggattcagtctcaataaccttagcttaatggcgctcaccatcgctactggtttcgtggtggatgacgccatcgtggtgctggaaaacattgcacgtcatctggaagcgggaatgaaaccgttgcaagccgcactgcaaggtactcgcgaagtcggttttacggtgctgagcatgagtctgagtctggtggcggtgttcctgccgctgctgttgatgggcggattgccgggccgactgttacgcgaatttgccgtgacgctttctgtcgccattggtataagcttgctggtttctctgacattaacgccaatgatgtgtggctggatgctgaaagccagcaagccgcgcgagcaaaagcgactgcgtggttttggtcgcatgttggtagccctgcaacaaggctacggcaagagtctaaaatgggtgctcaatcatacccgtctggtgggcgtggtgctgcttggcaccattgcgctgaatatctggctgtatatcagcatcccgaaaaccttcttcccggagcaggacactggcgtgttgatgggcgggattcaggcggatcagagtattagctttcaggcgatgcgcggtaagttgcaggatttcatgaaaattatccgtgacgatccggcagtggataatgtcaccggctttacaggcggtagccgagtgaacagcgggatgatgtttatcaccctcaagccacgcgacgaacgcagcgaaacggcgcagcaaattatcgaccgtctgcgcgtaaaactggcgaaagaaccgggggcgaatctgttcctgatggcggtacaggatattcgcgttggtgggcgtcagagcaacgccagctaccagtacacgttgttatccgacgacctggcggcactgcgagaatgggagccgaaaatccgcaaaaaactggcgacgttgccggaactggcggacgtgaactccgatcagcaggataacggcgcggagatgaatctggtttacgaccgcgacaccatggcacggctgggaatcgacgtacaagccgccaacagtctgttaaataacgccttcggtcagcggcaaatcagcaccatttaccagccgatgaaccagtataaagtggtgatggaagtggatccgcgctatacccaggacatcagtgcgctggaaaaaatgttcgttatcaataacgaaggcaaagcgatcccgctgagctatttcgctaaatggcaaccggcgaatgccccactaagcgtgaatcatcagggattaagcgcggccagcaccattagctttaacctgccgaccggaaaaagcctcagcgacgccagtgcggcgatcgatcgcgcaatgacccagcttggtgtgcctagcacggtgcgcggcagttttgccggcacggcgcaggtgttccaggagacgatgaacagccaggtgatcctgattatcgccgccatcgccacggtgtatatcgtgctgggtatcctttacgagagttacgtacatccgctgacgattctctccaccctgcccagcgcgggcgttggagcgctgttggcgctggagctgttcaatgccccgttcagcctaatcgccctgatagggatcatgctattaatcggcatcgtgaagaaaaacgccattatgatggtcgattttgcgcttgaagcccaacggcacggtaacctgacgccgcaggaagctattttccaggcctgtctgctgcgttttcgcccgattatgatgactaccctggcggcgctgtttggtgcgctgccgctggtattgagcggcggcgacggcagcgagctgcggcaacccctggggatcaccattgtcggcggactggtaatgagccagctccttacgctgtataccacgccggtggtgtatctctttttcgaccgtctgcggctgcgttttagccgtaaacctaaacaaacggtaaccgagtaaatgacagatcttcccgacagcacccgttggcaattgtggattgtggctttcggcttctttatgcagagcctggacaccaccatcgtaaacaccgcccttcccagtatggcgcaaagcctcggggaaagtccgttgcatatgcacatggtcattgtctcttatgtgctgaccgtggcggtgatgctgcccgccagcggctggctggcggacaaagtcggcgtgcgcaatattttctttaccgccatcgtgctgtttactctcggtagtctgttttgcgcgctttccggcacgctgaacgaactgttgctggcacgcgcgttacagggcgttggcggcgcgatgatggtgccggtcggcagattgacggtgatgaaaatcgtaccgcgcgagcaatatatggcggcgatgacctttgtcacgttacccggtcaggtcggtccgctgctcggtccggcgctcggcggtctgctggtggagtacgcaagctggcactggatctttttgatcaacattccggtggggattatcggtgcgatcgccacattgctgttaatgccgaactacaccatgcagacgcggcgctttgatctctccggatttttattgctggcggttggcatggcggtattaaccctggcgctggacggcagtaaaggtacaggtttaagcccgctgacgattgcaggcctggtcgcagttggcgtggtggcactggtgctttatctgctgcacgccagaaataacaaccgtgccctgttcagtctgaaactgttccgtactcgtacctttagcctgggcctggcggggagctttgccggacgtattggcagtggcatgttgccctttatgacaccggttttcctgcaaattggcctcggtttcagcccgtttcatgccggactgatgatgatcccgatggtgcttggcagcatgggaatgaagcgaattgtggtacaggtggtgaatcgctttggttatcgtcgggtactggtagcgaccacgctgggtctgagcctggtcaccctgttgtttatgactaccgccctgctgggctggtactacgttttgccgttcgtcctgtttttacaagggatggtcaacagcacgcgtttctcctccatgaacaccctgacgctgaaagatctcccggacaatctggcgagcagcggcaacagcctgctgagcatgattatgcaattgagcatgagtatcggcgtcactatcgccgggctgttgctgggactttttggtagtcagcatgtcagcgtcgacagcggcaccacacaaaccgtctttatgtacacctggcttagcatggcgttgatcatcgcccttccggcgttcatctttgccagagtgccgaacgatacgcatcaaaatgtagctattagccggcgaaaaaggagcgcgcaatgaagttctggcgacccggtattaccggcaaactgtttctggcgattttcgccacctgcattgtcttgctgatcagtatgcactgggcggtgcgtatcagttttgagcgtggctttattgattacatcaagcatggtaatgaacagcgattacaactgttaagtgatgcgcttggcgagcagtatgcgcagcatggcaactggcgcttcctgcgcaacaatgatcgctttgtctttcagatcctgcgtagttttgaacacgataatagcgaagataaacccggcccgggtatgccaccgcacggctggcgtacccagttctgggtggttgatcaaaacaacaaagtgctggttggtccgcgagcgccgattccacctgacggtacacggcgacccattctggtcaacggtgcggaagttggcgcggtgatcgcctcccccgttgagcggttaacgcgcaatactgatatcaatttcgataaacaacagcggcaaaccagctggttgattgtcgccctggcaacgttactcgcggcacttgccacttttctgctggcgcgcggtttactggcaccggtaaaacgacttgtcgatggcacgcacaaactggcggcgggcgatttcactacccgcgtaacgcccaccagtgaagatgaactgggcaaactggcgcaagacttcaaccagcttgccagcacactggagaaaaaccagcaaatgcggcgcgattttatggccgatatttctcacgaactgcgtacgccattagcggtgctgcgcggtgaactggaagccattcaggatggcgtgcgtaaattcacgccggagacggtggcgtctttacaggcggaggtcggtacactgaccaaactggttgacgatctccatcagttgagcatgtctgatgaaggcgctctcgcctatcaaaaagcaccggtagatttgatcccactgctggaagtggcgggcggcgcatttcgcgaacgattcgccagtcgtggcctgaaactgcaattttccctgccagacagtattaccgtatttggcgatcgcgaccgtttaatgcagttattcaataacttactggaaaacagcctgcgctacactgacagcggcggcagcctgcaaatctctgccgggcagcgcgacaaaacggtgcgcctgacctttgccgacagtgcgccaggtgtcagtgacgatcagctacaaaaattgtttgaacgtttttatcgcaccgaaggttcccgcaaccgtgccagcggcggttccgggctggggctggcgatttgcctgaacattgttgaagcacataatggtcgcattattgctgcccatagcccttttggcggggtaagcattacagtagagttaccgctggaacgggatttacagagagaagtatgaccgagttaccaatcgacgaaaacacaccgcgtattttgatcgtggaagatgaaccgaagctggggcagttgctcattgattatctgcgtgctgcgagctatgcgccgacgcttatcagccacggcgatcaggtactgccgtatgtgcgccagacaccaccggatctgatcctgttagatctgatgctccctggcaccgatggcctgacgctgtgccgggaaattcgtcgtttttctgacattccgatcgtgatggtgacggcaaaaatcgaagagatcgatcgcctgctggggctggagattggcgcagatgattatatctgtaagccgtacagcccacgggaagtggtagcgcgcgtcaaaaccattttgcgccgttgcaaaccgcagcgcgagttgcagcaacaggatgctgaaagcccgttgattatcgacgaaggtcgttttcaggctagttggcgcggtaaaatgcttgacctgacgcctgcggaatttcgtctgctgaaaacgctctctcacgaaccaggaaaagtgttctcccgcgagcaattgctcaatcatctttatgacgactaccgcgtagtaaccgaccgcaccatcgacagccacattaaaaacctgcgccgcaagctggaatctctcgacgccgaacagagttttatccgcgccgtttatggcgtcggttaccgctgggaagccgacgcctgccgcatcgtttaattttagcgacattattttgttagccggagatggcgttcagaccagatccggcaacattatcccacgcatggtcagcaaactgacattatctctccgccctggcaggcatcagaaaatcgctcatactttaatcggtaaacagcacctttagaatcctgtcgtttgttttcgatttcaaaatataatgaaattatttgtttttaaatatcgagataacgatcacaaaaacgacaatatgaaaattattcgaggagtgaaaggcaaaaaaacggcctcccgatagggaagccgtagcaaagtgcgcgtgtttttatgccggatgcggtgtaaacatacgtggcagtgctatgtaggcatgataagacgcttcagcgtcgcatcaggcataggttgccggatgcagcgtaaacgccttatccgtcctacggggtggtgttgttcgtataaggcgtatcaggcgatagtaattttgctatcgagataaacgtcctgcacggcgttaatcagtttcacgccgtcagccatgcttttcttgaacgctttacgtccaagaatcagccccattccgcctgcgcgtttgttgataaccgcagtacgcactgcatcgctgaggtcagtttcaccgcccgcagcaccgccggagtttatcaacccagcccgacccatatagcagttagctaactgataacgcaccagatcaatcgggttttcgctggtcaatttgctgtaaacacgatcgtcggtgtaaccgtaattaattgctttatagccgccgttattttccgccattttttgtttgacgatatctgcaccgatggttgccgccagatggtttgcctgaccggtcaggtcggcggaaacatggtaatcaacgccatctttcttaaaggcggagttacgcaaataggcccacagcactgtcaccatacccagctcgtgcgcacgttcaaaagccgcagaaatttcttcaatctggcgacgactctcttcgctgccaaaatagatagtcgcaccaaccgcaaccgcgcccatgttgaacgcctgctccacgctggcatacagcgtttgatcgtaggtattcgggtaacttagcgtctcgttgtgattaagtttgacgaggaatggaatgcgatgcgcataacgccggcttacgctcgccagcacgccgtaagtactcgccacacagttacagcccgcttcgatcgccagttcaacaatgtttttcgggtcaaagtagagcgggttagcagcaaaactagctccggcagagtgctcaacgccctggtcaaccggcagaatagaaagatatcctgtgccagccagacgcccggtgttgtacaacgtctgcatattacgtaacaccgctggcgggcgattattgtcaatcattacgcggtctacgtagtcatgtccggggagataaagctggtcagaaggaattgtcatacaacggtgctgtaaaaggttgtcggcgtctttgccaagcaactgcgcaatatctgtcattactatgctcccgtaaattccgattggatatcggctatggattgtcctggcccgccttttgcgggcaatcataatcctggtcgttacgggcgagtttttccatcttttggatgttttttcagcgttttctgttggctcgattcatcagaaaaaatgttagcgcggtcaagttttcaccgcaaaggtatttaaaaggtattattaagtggtattgtcatcgcgtaccttacattacctgtcatgaaggaattaaaagatgaaaacaacagcaaagctgagcttcatgatgtttgttgaatggtttatctggggcgcgtggtttgtgccattgtggttgtggttaagtaaaagcggttttagtgccggagaaattggctggagctatgcctgtaccgccattgcggcgatcctgagcccaattctggttggctccatcactgaccgctttttcagcgcgcaaaaagtgctggcggtattgatgttcgcaggcgcgctgctgatgtatttcgctgcgcaacagaccacttttgccgggttcttcccgttactgctggcctacagcctaacctatatgccgaccattgcgctgactaacagcatcgcttttgccaacgtgccggatgttgagcgtgatttcccgcgcattcgtgtgatgggcactatcggctggattgcctccggtctggcatgtggtttcttgccgcaaatactggggtatgccgatatcagtccgactaacatcccgctgctgattaccgccggaagttctgctctgctcggtgtgtttgcgtttttcctgcccgacacgccaccaaaaagcaccggcaaaatggatattaaagtcatgctcggcctggatgcgctgatcctgctgcgcgataaaaacttcctcgtctttttcttctgtagtttcctgtttgcgatgccactagcgttctattacatctttgccaacggttatctgaccgaagttggcatgaaaaacgccaccggctggatgacgctcggccagttctctgaaatcttctttatgctggcattgccgtttttcactaaacgctttggtatcaaaaaggtattattgcttggtctggtcaccgctgcgatccgctatggcttctttatttacggtagtgcggatgaatatttcacctacgcgttactgttcctcggtattttgcttcacggcgtaagttacgatttttactacgttaccgcttacatctatgtcgataaaaaagcccccgtgcatatgcgtaccgctgcgcaggggctgatcacgctctgctgccagggcttcggcagtttgctcggctatcgtcttggcggtgtgatgatggaaaagatgttcgcttatcaggaaccggtaaacggactgactttcaactggtccgggatgtggactttcggcgcggtgatgattgccattatcgccgtgctgttcatgatttttttccgcgaatccgacaacgaaattacggctatcaaggtcgatgatcgcgatattgcgttgacacaaggggaagttaaatgaaaacagaacgtattctcggtgctctttatgggcaggcgttaggggatgcgatggggatgccctccgagctttggccacgcagccgcgttaaagcacactttggctggattgaccgttttcttcctggaccaaaggagaataacgcggcctgttattttaaccgcgccgaattcaccgacgataccagcatggcgctgtgtctggcggatgcgttactggaacgtgaaggcaagatcgatccggatctgattgggcgtaatattctcgactgggcgctgcgtttcgacgcctttaacaaaaacgtactaggtccgaccagcaagattgcgcttaacgccattcgcgacggtaaacccgttgctgaactggaaaacaacggcgtgaccaacggcgcagcgatgcgcgtcagcccattaggttgtttgcttccggcgcgtgatgttgattcctttattgatgatgtagcgctggcgtccagcccgacccataaatccgatctggcggttgcaggcgcggtagtcatcgcatgggcgatttctcgtgccattgacggagaaagctggagtgcgattgttgattccctgcctagtattgcgcgacatgcacagcaaaaacgcatcactacgttcagcgccagtctggcggcgcggctggagattgcgctgaaaattgtgcgcaatgccgacggcaccgaatccgccagcgaacagctttaccaggtcgttggcgcaggtaccagcactattgagtccgttccgtgcgccattgcgctggttgaactggcacaaaccgacccgaatcgctgcgccgtcctgtgcgctaaccttggcggcgacacagacaccatcggtgctatggcgacggcaatttgcggcgcgttgcatggcgttaacgctatcgatcctgcgttaaaggcggaactggatgcggtaaatcagcttgatttcaaccgctatgccacagcgctggcgaaatatcgtcaacaacgggaggcggtatgagcggcgctcgattacacacgctgctgcctgaattaaccacgcgtcagagcgtgatggtcgtcggcgcggcggtcattgacgtgatcgccgacgcttatgccctcccctggcgtgggtgcgatatcgaactgaaacagcagagcgttaacgttggcggctgcgcactgaatattgccgtggcgttaaagcgcctcggcatcgaagcgggtaatgccttgccgctcggtcagggcgtgtgggcggagatgattcgcaaccggatggcaaaagagggcttaatcagcctgatcgataacgccgaaggtgataacggctggtgtctggcgctggttgagccggatggcgaacgcacttttatgagtttcagcggtgttgaaaatcagtggaatcgccagtggctggcgcgattaaccgttgcgcctggcagcctgctctatttttccggttatcaactggccagcccctgcggcgaattgttagtggaatggctggaagagctgcaagacgtgacgccgtttatcgattttggcccacgtattggcgatatcccggatgcattactggcgcggatcatggcctgtcgacctttagtgagcctcaatcgtcaagaggctgagattgccgccgaacgttttgctttatccgcagagataacaacacttggcaagcaatggcaggagaaatttgccgcgccgttgatcgttcgtctcgataaagaaggcgcatggtatttcagcaacgacgcttctggctgcattccggcatttccaacgcaagttgtcgacaccattggggcgggcgacagtcatgccggtggcgtacttgccgggctggcctctggtctgccactggcggatgccgtattactgggcaatgcagtggcgagctgggttgtcgggcatcggggcggtgattgtgcgccaacgcgcgaggaactactcctcgcacacaaaaacgtataattactcctcgcacacaaaaacgtatagatcgctgcgacagtggctaatgctgtactcaataggccgttgctgttggtcaagcgccacttgcttgatcaccagcaccggtattttgctatctaactgaatatgactctgaaactcggcatccggcatccgggcgctaacgcgggaacgcgtacgttgtgggtaaatgtgctggctgcggaaatagtcataaagactaatcccgatggcatcaacatcatgaattaaatgcgccggaacccagctttcctcaatgcttaccgcttcttcatcgacatagcgaatacgcttaagcaaaaagacatcacttcctgcttcgaccgccagctgctgcgcgacttcttcgggacatttcacgacacgcttgttaacccatagcgtatcgggctttttcccgcgcaataccacctgctgagaaaaacctcgcgcttctttcaagctgtattcgaagatgttgttgatctgcgtgccgtaaccgcggctacgcgtcaccacaccctcttcttccagcgcctgcatcgccttgcgcaccgtaatgcggctaacgccggttaactgacttaaatcacgctcaccgggcaaaatattgccatgctccagcaccccgctgcgcacggcattttttaccgtttcggcaaacttaatataaagcggcgtgttatccgccgctaaaatacgctcgttcagttgggcaatcagctgggtatgcgcttgttccatttgtctttttcctgccggggagtctggtgggagtatatcactgcttcttatttaaggcgtttctttaatcccatcaacgaatgcctgcaactcctccaccgtgccattaaatacattaaaatccaccggaccattgatgccatctacctgtccacggtcggaatgctgccagaagcgccaggccattccgtcattgtccggacgacgttgatagtagtgagccacccaccacggatattcattgaaatagcccgccagattggtgtgataaaaaacggctccactgtaaataatcggctttttccccgtacttttttcgaccatttttagccactgacttacccgcttgcgtaattcttttgcgcttaattttccccgttcttctacgtccagcacggcagggaaatcgccttgactgaaatccaccgtttgcagaaataatctcgcctgaacactagcggatacgctcggggagaaataatgatacgccccacgcagcaggccattttcgcggcttagttgccagttacggctaaaataggggtccaccagcttttcgccttccgtcgccttaataaaagcaaactgtaagcggataccattgtcgcgcatttttgccacccgctgccagtcgatccgctcctgccagcggctaacatctattccgtgaatggtgtaactggcaggaatgcgaatagcgaaagatttaaccgggcgataaccgtagaagtggatgtagtctgtaatctgaactgctgtgctatagaaaaaattcaccgtctgacgcggataaattgcaacgatggaaattagcccaagagcgcataatagagaggtgagtttttttcgactggtaattcttagctgcattggtttcatccctgaatgtcagtgccaaaggctgacaataaccaaagcagctatagtacggtgctcaccaccaggcgtggaagtggtgaaccggaccaataccgtgaccaacttccagcgtgtcggcctgggctaacgcgctactaagccagctttttgcctcctgtacggtgtcagcccagtttgtatggcgcgggcgtagtgcagccaacgccgcagagagtgtacaaccagtgccgtgggtgtttttggtcataatgcgcggtgcggtaaaccgttgttcaccctcgcgggtaaacagccagtccgggctttgctcatcatccagatgaccacctttcattagcactgcgccacagcccatcgccaacaggcttcgcccttgttccagcatttcctgttcggtgcgcgcgtgtggcgcgtcgagcaaggcggcagcttcgggcaagtttggcgttattaaactaacctgtggcaataatcgactgcgcagcgtagcaaccgcgctaggactaagcagcgggtcgccgctttttgccagcataacggtgtcgagtaccacgttttggatctgataacgttgcaaccgttctgccaccgcttcaacaatatcggtttccgccagcataccgattttagtggtatcgattcgcacatcgctgaacacgctatcgagctgggcggcgacaaaatcaggctcaatgcgatacacgctctgtacgccacgggtattttgcgccaccagtgcagtaataacactgcaaccataagcgccaagtgcgctgaaggttttaagatcggcctgaatccccgcaccaccactcggatcagtaccggcaatcgtcagagcgttaattcgtttcatgcctgcacctcctgcgtcaattgccagagcgcatcaaggaaatgtggaacaaaactgcctggcccctcgcttctggcgactgcgcgttctccggcttgtttcatccagtgacaggcagatgcgacattttccagcgtatcgcctggtaacgcacagcaggcagcgacaaccgcgcttaatgcacagccagttcctaccactttggtcattaacggatcaccaccgtgaataccaatgatacgatgtccatcggtaacataatccatctcgccagtgaccacgacgattgcgccagtttcccgtgccagtgtttgtgcagcgggtatcgcgttagctgcggcgtcagtggtatccactccccgtccgccattagcaatgccagctaatgccatgatttcgctagcattaccacgtatcgctgccggtttaaaagataaaagttcatgacaaaaatggcggcgataatcgagcgcacccaccgctactggatcaagcgtccagggtgtttgagagctttttgcttgctcaacggcagcacgcatcgcctgagcgcgtggctgcgtcagtgtgccaacgttaatcaacaaggcactggcgatagccgcaaactgactggcctcttcggtttcgataaccatcgctgggcttgcaccgagcgccagcaaggtattggcggtaaaggtttgcaccacatcattggtcatgcagtgcacaagaggggaatgttggtgaaaaaggtgtaacgcgtgcgcagattgcgcactacccagcaggtcgacttgcatagtttgctcctgccataacgtgaagaagcaatgacctggtggtccgtgacttccctacgctggcattatccagatcaggtgatacgggtatttctcagccttcacgcagaagggcaccccgagtcgtttggttgcgatgataaatcgcagaggaggatggtaatgtccagcgcacgcgttgtaaacgaggaaaaacggcagttttacaatcgcgttaataaattatttgatataactatccagcaccttcagaacgacatccagatcttcttcacgttttagctcatccccctggtgaacgatgtgttccgtcagatgacctttaatcacttcccgcatcagaccgtttaccgcgccacggatagcagcaatctgttgtaaaactgcagcgcattcgtgcggctcgtcgagcattttcttgagcgccacgacctggccctgaatcttactggcacgcgctttcagtttctgtttatcacggattgtatgagacatggcaacacctggttaacaagaatatgaaaaatcatagcactattaatctactggggggtagtatcaggtactgggggggagtagaatcagattgccgaattaatactaagaattattatcatgaccgaatttacaactcttcttcagcaaggaaacgcctggttcttcatccccagcgccatcttacttggtgcgcttcatggcctggaaccagggcacagtaaaacgatgatggcggcgtttatcatcgccatcaaaggcaccattaaacaagcggtgatgctcggactggcagcaactattagccataccgcagtggtctggttaattgcctttggcgggatggtgatcagcaagcgctttactgctcaaagtgcagaaccgtggctccagctgatttccgcagtgatcattattagcaccgcgttctggatgttctggcgtacctggcgcggcgaacgcaactggctggagaatatgcacgggcatgattatgagcatcatcatcacgatcacgaacatcaccacgaccatggacatcatcaccatcacgaacatggcgagtatcaggatgcccatgcacgagcccatgccaatgacattaaacgacgctttgatggtagagaggtcaccaactggcaaattttgttatttggcttaaccggtggccttatcccctgcccggcagcaattaccgtgctgttgatatgcattcagttgaaagccctgacactgggcgcaacactggtcgtcagtttcagcattggcctggcgttaacgcttgtcaccgtaggcgttggcgcagcaatcagcgttcagcaggtcgcaaaacgctggagcggatttaacactctcgctaaacgcgccccctatttttccagtctgttgattggcttagtcggtgtgtatatgggcgtacatggcttcatgggcataatgcgataactcaatcctttaggcttgcatgttatcttcagcccaggatgattcttaaatcagctatttccgctgactctctgctcgctaaggatgcttttagggcatcctttcatttacactttttacgaaatcatgggatcactaacaaaatatcgcttgtcagttatattgtatggcaggaaagatatgcgactgatattacagatccccaaagtggagagtttatgaccattaaaaataagatgttgctgggtgcgcttttgctggttaccagtgccgcctgggccgcaccagccaccgcgggtagcaccaataccagcggaatttctaagtatgagttaagtagtttcattgctgactttaagcatttcaaaccaggggacaccgtaccagaaatgtaccgtaccgatgagtacaacattaagcagtggcagttgcgtaacctgcccgcgcctgatgccgggacgcactggacctatatgggtggcgcgtacgtgttgatcagcgacaccgacggtaaaatcattaaagcctacgacggtgagattttttatcatcgctaaaaaaagccccctcatcatgagggggaaatgcagacaccttgttattttttattattagccacttgctcgtcttgcttgttattagtcgtatttcacgttgattaatgcggttgcctccagtgcgccagatttaactttgtttgtatcgtagacgtagtaactggctgttatcggaatactaaccgttgtatctgtaagtttactcttcgccgcaacttcctttaaatttgtatatcctttactgctgttagtgatatttaaaagtgtgactgggctaccattactttcaagaataaatcctacgccattatcttccgcacctttcagtattgtgttgctgttggttaacaagtcagaactacttaaatacacctgcattttccgacttgtttgattttgttgacctaataaatttttacaacgcagaataatatccccttgtttactatttattgttgctttgttacctgtggctggtaattgactaacgggaatactgtctaaagtaattaataaatcgtccggtttgcaggttgtggttatcgggttgtaactcaatgtcagattaaaggaatagacacctgcattttgtgccaatgcatttctgtagctatttacacatgcatcccaactcttgccacctaataaacacagtagaaattgtactgcggcactcccgcgtgtgctactactagcactggataatgtcgcaacaccattaatcatcacactaccgccgccccccgcagaaacattcacttttgcattactggccgcaggtgtcaccgtaacactataaccactggtgaaactggtctgattattactcaacgtgatgttgtttttattggtccattcaaaatgtaaatttaattttatggtatcgttataaagtccaacaataatatcgctcgggctcataggggtgatagtatttgtacttacgcaactgctatcattaaaattatgctcatatgtcgccatttgtgtttgagtaagtgcaaaatccccctgaacaaccaagttgtgctgaacagataactcactataacatgccgcatagctcacaggcataaccatcatcattaatataaatagcattatgcgaatttccatagaaccacctgactattactggcaaatataatttctactttcatcaatctctttaccgaaggtgattgtgcaactaagtccttgttgcttatcaattgccacattaacgcttggcggtacttcattggtgcgaataaataactgacttccctggccgacaacgccaatattatgaccatggatatcattgacttcataaccaaacgttaaactttgcccatctgctcttaacgcttttataaaccatggcttgcgctgatcggtatcaaaattaaccagtacaaccgcgccgcgataaggggcggcaattttccggttgccacgtaattctgcttcgctatcgctttggctcacatccagcatcaggtgattttcccgataaggtgtcattccgtcgtatatcaccactccattacggtttgttgtgcgatatttttgcccattgacataagcatctttaattcctggcgcattcatcacagcaaacgtttcggaaagacggttcgccagattaacgccaccgctccaggcgacaatgcccccactaacactggctccagcctgtcgataagtactgctctgactataactgccattcactgtcgcaaccggcgcgttccaggtcaaattcgccccagctgtcgtttcatttccctgatgttgatgactcaggttgacaccataattgaactgatcccgactccctactgttccacttaatcccgtattattactggcaaacccctgatcatcaaacgtcgtactgttagacatatatatttgccgacgaggcgtgctaacgtcatcaccccaatcaaagggaatgcttataaaaatattaaaacgtttctcttcatgatgattctcgtcataagcctggcttgccgcgagggtatagcttatccgtcgcaggttgttggaataactcaactgataatccttactactgccgctacgcccccagtaatctcgccataacgtacttaaactcacagacccccaaccttctggcaaactctggctcatattggcggaaaagctatttttgcggccaaaatcgttctggtaataatcggcaatgtcatagacatcgttttcatcacggcgataattatctttattgtttgcccaaacgtgatcgttaaatgtccggtaatcacggctgctataacgccaggccgccagaccaaaacgcgtgctcgtttggctcacaaatttgttgtaggcaatttgataactttgcccgtcaaacacatcgccgttgtcttgtttactatggctcttagtggcatcgacggaaatggcaccaatgcgtgtattccagccagcccccaaagtaaacgcgtaataattattcgcgaccatgctgccaccatacagcgtcaataaattattaaaaccatactgataacccgcctggacaaaatcactttgtttgctcgccccttcaatatggctacgacccgccgctaaatcatatttgctcacgccgggttgcagcatatttggcaccgctgcataaggcaccagataggtggttacgctgccgtccgcctctttcacgctgacatcaagatctgctccaccaccggccaactgcaaatctgtaatcgcgaacgggccaggaggaacctctttctgataaaccacaaaaccattctgttcaatagttaccagcgcgttactctgagcaatcccctgcacccgtggcgtaaaattttgtttgctgttaggcaacatctgcatatcacgaaacaaccgcacacctctgaagcgaacagaatcaaaaatatcgctacttgtgtacatatcacccacgcgaagcgtgccgagaagttgggcaaatccacgttccagatacagggtattgcttttccacacccctggattgttatttgttttactgaaactggcatcagaatgcagttgccaccccagtaaatttaacccgctgttaaaacgtacatatgtactcttgttattaccgctcgctttatagtcgctgtaatactgactcagataataagaggtataaaacgcattaataccccgctcccagttttccggtggaacatagccactttccagttcttccacccaggcctgcgggacactgaaatcgagacgaaaaaccccgatatcccaggtatagctcccaccctgaacaagttgctcaaatgttaaacattgcttaccgctggcgaagttatcgctattaatgcctaaccgcttgataacttctctacttaaacatgtttcttgcgggttgtctttaacaataatctcatatttcccgcgccattgcttattgacataaatatcgatgtcatactgccccggtaagggttgattatcatcaagacgaatatttgcaacctgctggtctttcattccacctatcataaaatgggtatcaaaggtttcttcagctgcataagcttcaatgccgagcaataacgctacgattgcacttgcaagtggggtcattctcaacataggcagctcctgcaattaaattttgtcactaatatagttgccatggtcatcgataatggtcagatgccagttatttgcattattacttttgacattaacactctgactttctaagggggcaatcataatagtttcataattgactttgacattattagctttgacatcgctaatcgtcacccaattagcactgtcattttttatcaccaaaccattgccactgcgatttaccagcaattttttaaatgtcgctttatttaccggagcaatacccgctggccggtaaaacaacttaattctgttttgcatcgcaaacttcagtgcattcttaccttcttgctctggactatttggtggaatatccagaacattcagataaaaaatgctttctttattagtgggcagtttattcggcataattttgatttttacttgctgcccggaatttgcccctatttttgccactggtggcgttaacatgaaaggaacctgaattttttctggtggtaaactcgtatcgccatcatcaatccacgcctgcagcaggctagaacggtttccctggttcatcaactgcaccatcacttctttattttctgccgggtaaataatgcgcgtcccgtagataacaattccggcatgtgcaggaaggaccatagaaaaaatgagtaaagataataatcctttcattttaatgcctcttaaattaaaaggccgccatgggatagcggccatgtttattacctggagaaacttacaattttatttattaatcctgcgccacacgcataaccagagaagataacacatcaccactttgcacactgttatctgtcagtttcaggtattttgctttaaacggaatagcatattgaccttccgctgttttataactctcaatgttaaaaggtgcagaaacatccaggacatcgctgttatcacctaaatagagatagtaacccacggtatcgttgctactggctatcgccttatcgttaccggttattttatcgttggtaatcaagctgagttttacaccagcaacttctttcgggcagctaatttttaacatgctgctggttacaccgactgcatcatcataggtagaatatttagctttaccttcaaagacactggttggtacagtcggcatattaatacttacactatcaccacccgcttcgaatttacacggagattctgcaatattccccttaatagttaatgttccggtatcaacgtctgcagcaaatactccagcgctcataaaaaaagaagaaaagacagcggcagcaataatactacgtttcataatatgttccttaataaaatttatttttggttgttaagagtctgtatctcttggaaacaaatttctcacatcaaaaaagttgccgcaatgtaaacacattgttttattgatttaaaacaaattaaccattgcaatataaatacaaaaaatatttaagagtattaactatttatcgcatctatcaattaatgtagatttatgtaaatggtattgttgatatcaataaaaaagccgaaatcatttatataaatgatttcggctttctaaatgcaattaaaatcaggttgccaaattaatcgtagcgatttaacacgattcgacgtttgctatcgctacctgcaacaaccacttctgtcgttacacctttgacggggctagaaaacagatgacgggtgtcaacattatacgttaactgaccacaatgctgttgaggttgaccattaaccatagccatactgcatgttgggggactgatcctgccattaatcgctaatgtggcagtctcactagagaatgcgggagaagccaatccataggcaagaaaaataattccactcagccaatacttattcattgaacgttatccctgtagtaaaggttatgcctggatagaatgagtgcataacaaactatagctgtacatccactacacagccacgaaggatgataatgaagcattgcctgtatgatcaatcgactttgtagagtttcggacgaaggtccgcagaatattcgcagtattaaataagtgttcattaatgcggcaaaaactaatacaccgcatcaatgtaacatctctgcggtgtatgaagaataaccagaatggttaataggcgttagaccgcgcggaaggaaatctcgcctggaatgacttcaccctgccagtagagctgagctgcaacgcggtcagccagctggcggtagatagcggtaaattcgctctccggacggctgataaccgttggcgtacctttatcgagatcctcacgtaaggagatgtgtaacggcatctgccccagcagctgtgtatggtatttttcagccagtttctctgcaccaccggtaccgaaaatcggttcatggtgaccacagttactgcaaatatgcacactcatgttctcgacaataccgagcaccggaacctcgactttctcgaacatcacaatgccttttttcgcatcgatcagcgcgatgtcctgcggggtggtgaccacgactgcaccggttactggaatgttttgcgccagcgtcaattgaatgtcaccggtgcctggcggcatatcaagcaccagatagtcgagatccggccacaaggtttcctgcaacatctgcattaacgccttgctcgccatcggtccacgccacaccatcgcattgtcgtcagtgaccagataaccaatactattggttgccaggccatgagacataatcggtgccatatgggtaccgtccgggctagttggacgctgattttctgcgcccaacattgttgggatacttgggccgtagatatcggcgtccagaatgccgactttcgccccttctgccgccagcgccagtgccaggtttaccgccgtggagcttttacccacgccgcctttaccggaactcaccgcgataatgttcttcacaccgttaattcccggctgattcttcacgcgtttcagagtggctatgttatggctcagtttccagtcgatagctttcgccccggtgatgcgcagcagttcggcgctacattgctcttttaactcttcgaacgcgctatgccagacaaacggcataaccagttccacatgcaacgtgtcgtccatccaggcgacatggtgcaacgctttcagcgtggtgaggttatgcttcagggttgggtgctgaaaattggccagtgtcccggcgaccattgcgcgcaaggcttctggacttttggcctgggattgttcgttcatcccgactccttttttgtatagataaaccatcagctgatagtttacctgaagaatatagagaagtacttacttaacattttcccatttggtactatctaaccccttttcactattaagaagtaatgcctactatgactcaagtcgcgaagaaaattctggtgacgtgcgcactgccgtacgctaacggcagtatccacctcggccatatgctggagcacatccaggctgatgtctgggtccgttaccagcgaatgcgcggccacgaggtcaacttcatctgcgccgacgatgcccacggtacaccgatcatgctgaaagctcagcagcttggtatcaccccggagcagatgattggcgaaatgagtcaggagcatcagactgatttcgcaggctttaacatcagctatgacaactatcacagcacgcacagcgaagagaaccgccagttgagtgaacttatctactctcgcctgaaagaaaacggttttattaaaaaccgcaccatctctcagctgtacgatccggaaaaaggcatgttcctgccggaccgttttgtgaaaggcacctgcccgaaatgtaaatccccggatcaatacggcgataactgcgaagtctgcggcgcgacctacagcccgactgaactgatcgagccgaaaagcgtggtttctggcgctacgccggtaatgcgtgattctgaacacttcttctttgatctgccctctttcagcgaaatgttgcaggcatggacccgcagcggtgcgttgcaggagcaggtggcaaataaaatgcaggagtggtttgaatctggcctgcaacagtgggatatctcccgcgacgccccttacttcggttttgaaattccgaacgcgccgggcaaatatttctacgtctggctggacgcaccgattggctacatgggttctttcaagaatctgtgcgacaagcgcggcgacagcgtaagcttcgatgaatactggaagaaagactccaccgccgagctgtaccacttcatcggtaaagatattgtttacttccacagcctgttctggcctgccatgctggaaggcagcaacttccgcaagccgtccaacctgtttgttcatggctatgtgacggtgaacggcgcaaagatgtccaagtctcgcggcacctttattaaagccagcacctggctgaatcattttgacgcagacagcctgcgttactactacactgcgaaactctctagccgcattgatgatatcgatctcaacctggaagatttcgttcagcgtgtgaatgccgatatcgttaacaaagtggttaacctggcctcccgtaatgcgggctttatcaacaagcgttttgacggcgtgctggcaagcgaactggctgacccgcagttgtacaaaaccttcactgatgccgctgaagtgattggtgaagcgtgggaaagccgtgaatttggtaaagccgtgcgcgaaatcatggcgctggctgatctggctaaccgctatgtcgatgaacaggctccgtgggtggtggcgaaacaggaaggccgcgatgccgacctgcaggcaatttgcagtatgggcatcaacctgttccgcgtgctgatgacttacctgaagccggtactgccgaaactgaccgagcgtgcagaagcattcctcaatacggaactgacctgggatggtatccagcaaccgctgctgggccacaaagtgaatccgttcaaggcgctgtataaccgcatcgatatgaggcaggttgaagcactggtggaagcctctaaagaagaagtaaaagccgctgccgcgccggtaactggcccgctggcagatgatccgattcaggaaaccatcacctttgacgacttcgctaaagttgacctgcgcgtggcgctgattgaaaacgcagagtttgttgaaggttctgacaaactgctgcgcctgacgctggatctcggcggtgaaaaacgcaatgtcttctccggtattcgttctgcttacccggatccgcaggcactgattggtcgtcacaccattatggtggctaacctggcaccacgtaaaatgcgcttcggtatctctgaaggcatggtgatggctgccggtcctggcgggaaagatattttcctgctaagcccggatgccggtgctaaaccgggtcatcaggtgaaataatcccccttcaaggcgctgcatcgacagcgccttttctttataaattcctaaagttgttttcttgcgattttgtctctctctaacccgcataaatactggtagcatctgcattcaactggataaaattacagggatgcagaatgagacactttatctatcaggacgaaaaatcacataaattcagggcagttgagcaacagggaaacgagttgcatatcagttggggaaaagttggcaccaaagggcaaagccagataaaaagtttttcagatgctgcggcagcggcaaaagcggagcttaagctgattgcggagaaggtgaagaaggggtatgtggagcaagcgaaggataattctttgcaaccttcccaaacggtaacgggctctctcaaggtagcggacttatccaccattattcaggaacaaccctctttcgtagcagaaacccgtgcgcctgacaaaaatacagatgctgttttaccgtggctggcgaaagatattgctgtcgtttttccgcccgaagttgtacacaccacgttaagtcatcgccgctttcccggagttcctgttcagcaagcagacaaattgccccaattacgtcgcttagcctgtagtgtgtcgcaacgggataataaaacagccacatttgacttcagcgcctgttctttagaatggcaaaacaccgtcgcccaggcgatcagtcagatcgacggcctgaaaacaacacagttaccatcaccagtaatggctgtactcacggcacttgaaatgaaatgcacaagatataaagtgcgtgaggatgttatggatcagatcgtccaggaaggcggtctggaatatgctactgatgtaataatacaccttcaacagattgatattgaatgggattatgcgaataatgtcattattattctgccgtctggcattgcacctagctacttggagcaatattccagatttgaatgacgcctacgtaaacatttatcactgacggaagagtctctctggcaaaaatgtgcacaaaaacttattgccgcaattccacatattccagaatggcggcaaccattaattgctttgttattacccgaaaaaccagaaattgcacatgaaattgcccagcgtctactggggcaaaaaaaattaccctcgcttgagtggttaaaaatagtggcgactgatgagcacattcttgcctcattagaaaaatatcacgaaccatatgccatttttgatgattactattgtggtgcgatatggtcagccaccgtattacaggagcaaggtgttgcagccctgccccgatttgctccctatgccgcaagtgactactgcgccgatgtgttgcgtcatatcaatcatccgttcgcattgacactgcttatacgtgtagccgggcaaactaaacgctgtcacgatcggatgacgaaagccattgctgcgttcccacatgcagcaatggcggcactgacggaacttcttgggcaaaaagaagagaacagttggcgcattatgctaatgacaatgcttatctcacaaccagcactggcagaacaggtcattccctggctctcgacacccgcagttgccgtactgaaatcatgccagcaacaactgacacagccctcaaaccatgccagcgccgatctactgccagccgtagtagtctcccctccctggctttcgaaaaagaaaaaatcgccgattccggtgctggatttagcgccattaggcattgagccaatctgttatctgacagaagaaatcagtaatcaacttttggcgaaatatatctggtattcaaaacacatcacggttagccatgaagaaagtactaccaacctgttggcaaggatgggttttcaacgacggatcgctggtacatatattaaagctcccgaagcggtagttgaggcatggctaaatgaagattattcaaccttactaagtgaatttaaggtgtttcattcacctaccgggcattattggcagttggggattttgacaacattgccgctggagaaagcagtaaaagcatggaatgcccttaccctatctccacataccgataccgaatactccatgttacattttggactcaaagggttacctgggttagtaaactcacttgcacgctatccacaagaagccttgcccatcacgaattacttcgcagcgagtgagctggctcctgccgtcgcccgtgccttcaacaaactgaaaacgctacgcgaaaacgcccgtagctggctgttgaaatacccggaacatgcccttaccggcctgctgcctgcggcgctcggcaaagccggtgaagcacaggataacgcccgcgctgccttgcgtatgcttaccgaaaacggtcatcagccattactgcaagaaatcgcccgacgttataaccagccggaagtaaccgatgcggtgaacgctctgcttgcgctcgatcccttagataatcacccgacaaaaatccccactcttccggccttttatcagccatcgctctggacgcgcccggtattaaaagcaaatgcccaatcactgccagatagcgccctcctccacctcggtgaaatgctccgcttccctcaggaagaggctctgtatccgggattattgcaggtgaaagacgtctgttccgccgactcactggcgggatttgcctgggatctgtttaccgcctggcagaccgctggcgcgccgtcgaaagagagttgggcgttcactgcgttaggcgttctcggtaacgatgacaccgcccgcaaactgacgccattaatacgcgcctggcctggtgaatcccagcataaacgcgccaccgttgggttggatattctcgctgctatcggtagtgatatcgcccttatgcagcttaacggcatcgcccagaaactgaaattcaaagcattacaggagcgggcaaaagaaaaaattgccgacattgccgagagccgcgaactcacggtggcggagcttgaagatcgggttagcaccggatctcggtctggatgataacggttcgctgctgctggattttggcccacggcagttcaccgtcagctttgatgaaaccttaaaaccgtttgtgcgtgatgtttccggcagccgcctgaaagacctgcccaaaccgaacaaaagcgatgatgaaacgcgggcgaacgatgcggttaaccgctacaaattgctgaaaaaagatgcgcgtaccatcgccgcccagcaggtagcaaggctggaatccgccatgtgcctgcgccgccgctggtcgctggaaaacttccagctcttcctggttgagcatccgctggttcgtcacttaacccgccgtctgatttggggcgtttatagcgccgaaaaccagctactggcttgctttcgcgtagcagaagataacagctccagcaccgctgacgatgatcttttcaccctgccggaaggcgatatctctatcggcactcctcacgttctggaaatatcaccaacggatgctgccgcctttggtcagctttttgccgactacgaactgctaccaccgttccgccagctcgaccgtaacagctacgccctgacagaagccgagcgcaatgccagtgaactgacccgctgggcaggcagaaaatgcccgagtggtcgggtcatggggctggcgaataaaggctggataaagggcgaaccacaggatggaggctggatcggatggatgatcaaacctttgggtcgctggtcgttaatcatggaaatcgatgaaggctttgcggtaggcatgtcgccagccgaactcagcgctgagcagctcttaagcaagctgtggctatgggaaggcaaagcagaaagatatggctgggggagtaattcaacacaggaagcgcagttctccgtaatcgatgccatcaccgccagcgagctaattaacgatattgaagccctgtttgaataaggaaagagcatggacaaggaattaccgtggctggcggataacgcccaactggaactgaaatataaaaaaggcaaaacgccgctcagtcatcgtcgctggccgggcgaaccagtgtccgttatcactggaagtctcatccagacattgggtgatgaattgctacaaaaagctgagaagaaaaaaaacattgtctggcgttatgagaattttagtctggagtggcagtccgccatcacgcaggccatcaacttgatcggcgaacacaaacccagtatcccggcccggacaatggcggcgctagcctgtatcgcgcaaaatgacagccaacagttgctcgacgaaatcgtccaacaagaggggctggaatatgcgactgaggtggtgattgcacgccagtttattgcgcggtgttatgagagtgatcctctggtagtgacattgcagtatcaggacgaggattatggctatggttatcgcagtgaaacctataacgaattcgatctccgactgcgtaagcatctctctctggcagaggaaagctgctggcagcgttgcgccgacaaactcattgccgcactaccaggaataaacaaagttcgccgcccttttattgcgctgatcctcccggaaaaaccagaaatagccaatgagttggtaggccttgaatgcccgcgaactcattttcattctaaggagtggttaaaagttgttgctaatgaccccacagcggtgagaaaactcgaacactactggagccaggatatatttagcgatcgagaagccagctacatgagccatgaaaaccacttcggctacgcggcctgcgccgcccttttgcgcgaacaaggactggcagccattccgcgcctcgcgatgtatgcccataaagaagattgcggcagtctgctggtacaaattaaccatccgcaagtcatccgcaccttgctactggtggctgataaaaacaaacccagcctgcaacgtgtagctaaataccataaaaacttcccccatgcgacgctcgccgcactggcagaactgctggcgttaacagaaccaccagcccgccctggttatccaatcatcgaagacaaaaagctgcctgcacagcaaaaagcacgcgatgaatactggcgtacgctgttacaaacgctgatggcaagccagccacaactggcagcagaagtgatgccgtggttaagtactcaaccccagagtgtgctgaagagttatttaagcgcaccgcccaaaccggttattgatggcaccgataacagcaatctgccagaaatcctcgttagtccaccgtggcgtagtaagaaaaaaatgacagctccacgtcttgatttggcaccgctcgaattaactccgcaagtttactggcaaccaggcgaacaagagaggcttgccgccactgagcctgcccgttatttcagcacggaatctcttgcgcaacgcatggaacaaaaaagtggacgagttgtattacaggaactgggttttggggatgatgtatggctgtttctgaattatatactccccggaaaactggatgctgcacgcaatagtctctttgttcagtggcattactaccaggggcgggttgaagagatcctgaatggctggaactccccggaagcacaattagcagaacaggcgctccgcagcggtcacatagaagcgttaattaacatatgggaaaatgacaactacagtcattatcgtccggaaaagagtgtctggaacctgtatttattggcacagttgccgcgtgagatggctttgaccttctggctgcgtatcaatgagaaaaagcatctgttcgcgggtgaggactattttctcagtatcctcggattggatgcgctaccaggtctgctgttggcttttagtcatcgtccaaaagaaacatttccgttaattttaaattttggcgcaacagaactggcgctgcctgttgcccacgtctggcgacgtttcgcggcgcagcgtgatctggctcgccagtggattttacaatggccggaacatacggctagtgcacttatccctcttgtctttaccaaacccagcgataatagcgaagccgcattacttgccctgcgtttactgtacgaacagggacatggcgaattgctacaaaccgtggcaaaccgctggcagcgtacagatgtatggtctgccctggagcagttgcttaaacagggtccaatggacatttacccggcacgcattccaaaagcccctgatttctggcatccgcaaatgtggtccaggccgcgccttatcactaataatcaaactgttaccaatgacgctctggaaattatcggcgaaatgctgcgctttacccaggggggacgtttttatagcgggctggaacaactgaaaacgttctgccagccacaaacgctggcagcttttgcctgggatctcttcactgcgtggcaacaagctggtgcccccgcaaaagacaactgggcatttctggcgttaagtctctttggtgacgaaagcacggcacgggatctgacgacacagatcctcgcctggccacaagaaggcaaatctgcccgtgctgtcagcggcctgaacatccttaccctgatgaataatgatatggcgctgatacagctgcatcatataagccaacgggctaaatcccgccccttacgtgataacgcggcggaatttcttcaggtggtcgcagaaaatcgcgggctaagccaggaagagctagcggacagattagtcccaaccctgggccttgatgatccgcaggcgttgagttttgattttggtccccggcagtttaccgttcgcttcgatgaaaatctcaacccggttatctttgatcagcaaaacgttcgccagaaaagcgttccccgtttgcgcgccgatgacgatcaactgaaagcgcccgaggcactggcccgactaaaagggctaaaaaaagatgctactcaggtgagcaaaaacctgctcccgcgtcttgaaacggccctacgtaccacccgacgctggagcctggcagattttcattctctgtttgttaatcatccctttacccgtctggttacccagcgattaatatggggggtttatccggcaaatgaaccgcgttgtttactcaaagcctttcgtgtggccgcagagggggagttctgcaatgcgcaagatgagccaattgacctgcctgcggacgctctgattggcattgcccacccgttagaaatgacagcagaaatgcgcagtgaatttgcacagctttttgccgattacgaaattatgccgccttttcgccagttgagccgccgcacggtgctgctcacacctgacgagagtaccagtaacagcctgactcgctgggaaggtaaatccgctaccgttgggcaacttatgggaatgcgatacaaaggctgggagagtggctatgaggacgcatttgtctataacctgggtgagtaccggctggtccttaagtttagtcccggttttaaccactacaatgttgatagcaaagcgctaatgagcttccgttctcttcgagtgtaccgtgacaataaatccgtcacttttgccgaacttgatgtgtttgatttgagtgaggcgttaagcgcacctgacgtcattttccattaaaacacagcgggcagtgatgcaactgcccgttatcaacacgacttaccagcggggaaagcgatgatcgtgcaaaaagagctggttgctatttacgattatgaggtccctgtacctgaagatccgttttccttcagacttgagatccataaatgctctgaattatttacaggttccgtctatcgactggagcgattccggctacgtccaacatttcatcaacgtgatcgagaagatgctgacccgctaataaatgatgcgttgatttatataagagatgagtgtattgatgagcggaaattacgaggtgaaagtcctgaaactgtaatagcaatttttaatcgtgaactacagaatatattcaaccaagaaatagaataatatactctaaataattcaaattggtccgatccggcgcaacgtcccaatggcctggattataaatctcattatcttaattgcaacggggtccagccgtggttataattcgttcgttggaacacgatgttgcacaggctgtggtgttaggcctgaaaatagtaaataaaagaacctgcctcaccagcaggtttttttatttactgtgatctgctttccagatatttttcgctcaaacaactaatgcgccaaacatttattgcgcgtaaaatatcgtttatttcattaatacatttcagggatgaatatatgagtccgcagaataatcatctgcagcgtccgcctgctgctgtgttatacgccgatgaactggcaaaattaaaacaaaatgataacgcaccttgcccgcccggttggcagttaagtttgcctgcggcccgtgcttttatccttggcgacgaagcgcaaaatatcagccgtaaagtggtgattagcccctccgctgtcgaacgtatgttagtcactcttgctaccggccgcggtttgatgttggtgggggaaccgggtaccgcaaaatctcttctttctgaattactggcaaccgctattagcggcgatgccgggttaaccatccagggcggggcatctaccaccgaagatcaaatcaagtatggctggaactacgccctgcttatcaatcatggtccgagtacggaagcgctggtccctgccccgctttatcagggaatgcgcgacggcaaaatcgtccgtttcgaagagataacgcgtacaccgctggaagtgcaggactgtctgttaggtatgctttctgacagggtgatgacggggccggaactcactggtgaagccagtcagctctatgcgcgagaaggctttaatattattgccactgccaatacccgcgatcgcggcgtcaatgaaatgagtgctgcgctaaagcgtcgcttcgattttgaaacggtttttccgattatggatttcgcccaggagttggaactggtcgccagtgctagcgcgcgtttgctggcccatagcggtattccgcataaagtgcctgacgcggtactggaattactggtccgcaccttccgcgatctgcgtgccaacggcgaaaagaaaacgagtatggatacactgacagcgattatgtccaccgctgaagccgtgaacgtggcccatgctgtgggcgtccgcgcctggtttttagcgaatcgcgcgggggagcctgccgacctggtggaatgtattgccggaaccatcgtcaaagataacgaagaagatcgcgcgcgtctgcgccgttacttcgaacagcgtgtcgccacacataaagaagctcactggcaggcttattatcaagcccgccaccgcctgccgtgaggaaagatgcatgagcgagccgttaattgtcggcatccggcatcatagtccggcctgcgcccggctggtgaaaagcttaatcgaaagccagcggccacgatacgtgttgattgaaggcccggctgattttaatgaccgggtagacgaactgtttttagcccaccagcttccggtagctatttacagttattgccagtatcaggacggtgcagcccccgggcgtggtgcctggacgccatttgctgaatttagcccggagtggcaggcgctacaagccgcacgtcgcattcaggcacaaacttacttcatcgatttgccttgctgggcgcagagtgaagaagaggacgatagccctgatacgcaagatgaaagccaggccttactgctgcgtgccacccgcatggataacagcgataccctgtgggatcacttgttcgaagatgaaagccagcaaactgcattaccctctgcgctggcgcactattttgcccaactgcggggcgacgcctccggcgatgcgctcaatcgtcagcgcgaagcctttatggcccgctggattggatgggcgatgcagcaaaataatggcgacgtgttagttgtctgcggtggctggcacgctccggcactggcaaagatgtggcgcgaatgccctcagaaaattaacaagccagaattgcccagcctggcagatgccgttacaggttgttatctcacaccctacagtgaaaagcgccttgatgtgctggcaggataccttagtggaatgcctgccccggtatggcaaaactggtgctggcagtggggcttgcagaaggccggtgaacaactgctaaaaactatccttacccgtttgcgccagcacaaattgcccgcttctaccgcggatatggctgccgctcatctgcatgcgatggcgctggcacagttgcgcggtcatacactaccgttacgcactgactggctggatgccatagcaggcagcctgattaaagaagccctgaacgcgccgttgccgtggagctatcgcggcgttattcatcccgataccgatccgattctgctaacgttgatagacacattagcgggtgacggattcggtaaacttgccccttctacgccacaaccgcctctgccaaaagatgtcacctgcgaactggaacgtaccgcaatctcccttccggcggagcttaccttaaatcgctttacccccgatgggctggcgcaaagtcaggtgttacatcggctggcaatactggagatccctgggattgtacgccagcagggaagtacactgacacttgcaggcaacggtgaagaacgctggaaattaacccgcccgcttagccagcatgcggcattgattgaggccgcctgttttggtgccacactccaggaagccgcacgcaataaattagaagccgatatgctggacgcgggcggaatcggcagtatcaccacatgtcttagccaggcggcgttagcgggtctggcgtccttcagtcaacaattactggagcaactcacactattaatcgcccaggaaaatcaatttgccgaaatgggccaggcgctggaagtgctttatgccttatggcggctggatgaaattagcggtatgcaaggcgcgcagatattacaaacgacgttatgcgcgactatcgatcgcacgctgtggctgtgtgaatctaacggcagaccggatgaaaaggagtttcacgctcacctgcatagctggcaagcgctttgccatattctgcgcgatctacatagcggcgttaatttacccggcgtttctctttctgcggcggtagccttactggagcgacgcagtcaggcaattcatgccccggcgctggatcgcggcgcggctcttggcgcactaatgcgtctggaacatcccaacgccagtgccgaagcggcgctgacgatgctggcgcagttatccccggcacaatctggtgaggcgctgcacggtttgctggcgctggcccgccatcaactggcctgtcagccggcatttatcgccggtttcagcagtcatttaaatcaactgagtgaagccgattttattaacgccctgcccgatttacgcgcggcgatggcctggctaccaccacgagaacgcgggacgctggcgcatcaggtgcttgagcattatcaactggcgcaacttcccgttagcgcgctgcaaatgccgttgcattgtccaccacaggccattgcacatcatcaacaactcgaacagcaggcactggcaagcctgcaaaactggggagttttccatgtctgaactgaacgatcttctgaccacccgtgagctacaacgctggcgattaattcttggcgaagcggcagaaacgacgctttgtgggctggatgacaacgcccggcagatagaccacgcgctggagtggctgtatgggcgcgatcctgaacggctccagcgtggtgaacgttccggtggattaggtggcagtaatctcaccacccctgagtggatcaacagtattcacacgctgtttccgcagcaggtgattgagcggctggaaagcgatgccgtgctgcgctacggcattgaagatgtggtgacgaatctcgacgtgctggaacgtatgcagccttctgaaagcctgctacgcgctgttttgcacaccaaacatctgatgaaccccgaagtactggctgccgcccgccggatagtgtgccaggttgttgaagaaattatggctcgactggcaaaggaagttcgtcaggctttttctggtgtccgcgatcgccgtcgccgtagttttattccactggcgcgaaactttgatttcaaaagtactctgcgcgccaacctgcaacactggcacccgcaacacggcaagttgtatatcgaatccccccgctttaacagccgcattaaacgccaaagcgaacaatggcaactggtcttactggttgatcaaagcggaagcatggtcgatagcgtgatccactctgcggtgatggcggcctgtttgtggcagttacccggcattcgtacccatctggtggcgtttgacacaagcgtcgttgatctcacggcagacgttgccgatccggtagagttattaatgaaagtacagttgggcggcgggaccaatatcgccagtgccgtggagtatggtcggcaacttattgaacaaccagcgaaaagcgtcattatcctcgtgagcgatttttacgaagggggtagtagtagtttactgacgcatcaggtgaaaaagtgtgtccagagcggcatcaaagtgctgggactggcagcgctcgatagcaccgcaacaccttgctatgaccgcgatacggcccaggcgctggttaatgtcggcgcacaaatagccgccatgacgccgggcgagctggcaagttggcttgcggagaatcttcagagttgacataacttgcggagaatcttcagtcatgaatagtctacgtccggaattattagaactgacaccgcaggccctgacggcgttaagcaatgccggttttgttaagcgcagtcttaaggaactggaaaatggcaacgtcccggagatcagccatgagaacgacgctttaatcgccaccttcagtgacggtgtccgtacccagctggcgaacggccaggcactgaaagaggctcagtgcagttgcggggccaacggtatgtgccgtcatcgcgtgatgctggtgttaagttatcaacgactttgtgccaccactcagtctacggaaaaagaagaagagtgggatccggcaatctggctggaagaactggctacccttcccgatgctacccgcaaacgcgcacaggcgctggtcgctaaaggcatcaccattgagttgttctgtgcgccgggtgaaattccctctgcccgcttaccgatgagcgatgtgcgtttttattcccgcagcagtattcgtttcgcccgttgtgattgtattgaaggcacactttgcgaacatgtcgtactggcggtacaggccttcgtcgaggccaaagcgcagcaagcagaatttaaccatttaatctggcagatgcgcagcgaacacgtcacaagttctgacgatccgtttgccagcgaagaaggcaacgcgtgtcgtcaatatgttcagcaattaagccagacattatggcttggcggcatcagccagccgctcatccattacgaggcagcattcaaccgcgcattgcaggcggcagagacctgcaactggcgctgggtgagtgaaagcctacggcaactgcgcgccagcgttgatgccttccacgcccgcgccagccactataatgccggagaatgcttacatcagcttgcggcattaaacagtcgattaaattgcgcacaagagatggcccggcgcgacagtattggtgaagttcctcctgtgccgtggcgcacggtcgttggctctggcattgccggagaagcaaagcttgatcatctgcggctggtgtctttaggtatgcgttgctggcaggatattgagcattatggtttacgcatctggtttaccgatcccgacaccggcagtattttgcaccttagccgcagttggccgcgaagtgaacaggaaaacagtccggcagctacgcgtcggctgtttagttttcaggctggcgcactggcgggcgggcaaattgttagtcaagcagcaaaacgcagtgccgatggcgagctgctgttagctacccgcaaccgcttaagcagcgttgtgccgctgagccctgatgcctggcaaatgttgagcgcgccgttacgccagccgggcattgtggctttgcgggaatatttacgccagcgtccccccgcctgcatacggcctcttaatcaggtcgataacttatttattctgccggtcgctgagtgtattagcctcggttgggacagcagccgccagacgctggatgcgcaggtcattagcggcgaaggggaagataatgtgctgacgttaagtttaccagccagtgccagcgcaccttatgccgttgaacgcatggcggcgcttttgcaacaaacagacgaccccgtgtgtctggtttctggctttgtcagttttgttgaagggcaattgacactggaaccacgggtgatgatgacaaaaacccgtgcctgggcgctggacgcagaaactacgcctgtggcaccgctaccttctgccagcgttttgcctgtgccgtctactgctcatcagttgctgatacgctgccaggcgttacttattcaactgctccataacggctggcgctatcaggaacagagtgctattggtcaggcataattgctggcgaatgacctcaccgcggtgggtttttatcggctggcacatgtgttgggacaatttcgtaatacagaaagcgaggcacgggtagaagcaatgaataacggtgttttgctttgcgaacaattattccccatgcttcagcaacaaggatgaaatagtgctttttactaagagttctactccagttccggactgctcacgccacggtattaggcatatcctatatagcccctggtgagagtcaccagttccttgattaaataaaatggagttttacatgaaggctttcaataagctgttttccctcgttgttgcatctgttctggttttctctcttgctggctgcggtgacaaagaagaaagcaagaaattcagcgccaatctgaacggcactgaaattgccattacctatgtctacaaaggtgacaaggtgcttaagcaatcttctgaaaccaaaattcaatttgcctccattggtgcaaccaccaaagaagatgctgccaagacacttgagccgttaagcgccaaatacaaaaacatcgcgggtgttgaagaaaaattaacctataccgatacctacgcgcaggaaaacgtgactatcgatatggaaaaagtggattttaaagccctgcagggtattagtggaatcaacgtttctgctgaagatgccaaaaaaggtatcactatggcgcaaatggaactggtgatgaaagccgctggttttaaagaagtgaaataatcggttggcggtcatgctctaaacatgaccgccaattttttagccttttttcacatgctggcgcgctgccagtccacgcagaaaataacgtaaaaattgatcgccgcattcgcggaagtttttatgatccggtgcgcgcatcatcgctgtaatttccggcatgctaacgcggaactgctgttcggtgaggatagccagaatgtcatcggttttcaggctaaacgcgatgcgtaattttttcagcacgatgttgttattaatgcgacgttccggctccagtgccggagcagactcatccttgccgcgtttttcataaatcaggccattgaggaaactgctcaaaacaatgtccggacaacgctgaaaaccctcttcgtcttctttacgtagccagacggcgatctgttccgcggtggcttcgacattacccagcgccagaatacgcaccaggtcattattattggctttcaaaatgtagcgcacgctgcgcagaatatcgttacttagcatgaggccttcaggtgttgatgaggcaaaaagccattttagcagtcttttacaggccaatcgcctcttttaagcttttcagataacggcggctgaccggcacggttaagccattacgcaaaatcaactcggcctggccgttatcttccagacgaatctcctgtaaatgcgcgaggttaaccagatactgacgatggcagcgcagtagtggtgtacgactttccagggtacgtaatgtcaattcggtaaagccctctttcccttcgtggctggtaacgtagacaccgctcatccgactgctgacaaatgccacatctttcatttgcagcaaataaatccgactatgccccgtacaagggataaatttcagcgcctgttgattttccggtaacaggctaacatcctgcttgctgcgctcctgacgcaatcgcgccagcgttttctccagtcgcgcttcatcaattggcttcagcagataatcaaaggcatgttcttcaaaggctttaattgcgtattcgtcaaacgcagtgagaaaaacaatatacgggcgatgttccgggtcaagcatccccaccatttccagaccactgatgcgcggcatctggatatcgagaaacagcacatccgggcgcagtttatgcaccgcgccgatcccttccacggcgttactacactctccaacgatttcaatatcgctctgctcctgcaaaaatacacgcaggttctcccgtgctaacggttcatcatcgacaattaagactttaatcatgcctcgtccctccatggtagtcgtaacgttattcgggtgtaactatcaggctcacaggcgacgcttattccatagtcatcgccaaaccgttcacgtaaacgcttatccaccagattcatccccagcccactggcattggttaccggttgatacaaaccggcattgtcttcgatctccagcatcaaatgttgcccctcacgtcgggcgctgattgccactcgccctgtatccagcagttgacttgtcccatgtttaatggcgttttccactatcggttgcagggtaaacgcgggcaattgctgctgggataattcttgcggaatagcaatgttgacctgcaaccggctctggaagcgcgccttttcaatttgcagataagcattcacatgttcaatttcgtcggcgagagtaacaaactcgctaggccgctttaagtttttgcggaaaaaagtggaaagatactgcaccagctggctggcctgttcgctgtcgcggcggatcaccgctttaatggtgttaagcgcattaaacaaaaaatggggattcacctgggcgtgaagcagtttgatctcactctgggtgagcatcgctttttgccgctcatattgcccggcaaggatctgcgcgctaagcaattgcgcaatcccctcacccaacgtgcggttgatactactgaataaacggtttttggcttcatacaatttgatggtgcccatcacccgctgattttcaccacgcaacggaattaccagcgtgctccccagtttgcattgcggatgcaaagagcaacggtaaggtacttcgttgccatcagcgtagaccacttcaccggtttcaatcgcttttaaagtataagtactagaaatcggtttgccgggtaaatggtggtcgtcaccaattccggtaaaggccagcaatttctctcgatcggtaatcgcgactgcaccaatatccagttcctgatacagcacctgagccactttcatgctgttcacttcgttaaacccctggcgcaaaatgccttccgtgctggctgccactttcagcgcagtggcagaaaaagcgctagtgtatttttcaaacatcgcgcgtttatcgagcaatatacgcataaacagcgccgcgccgacggtattggtgaccatcattggcgcagcaatattactcaccagacgcaccgcatcttcataaggtcgggcgatcgcaaggatgatcagcatttgcaccatttcagcgacgaacgtgacggcaccggcggtaatggggttaaagactttatcagtgcgcccgcggcggatcaggatgctgtgtaccaggccaccgagtaatccttcaacgatggtgctgatcatgcaacttaacgcggtcatgccccccatgctatatcgatgtaagccgccggtcagcccaaccagcccaccgacgaccggaccgccgagtaagccgcccattaccgcgcctatcgcacgggtattggcaatagaatcgtcaatgtgcaacccaaaccaggtgcccatgatgcagaagatggaaaagacgatgtagcagagaaatttatgcggcagacgaaccgtgacctgcattaacggtatgaataatggcgttttactcattaaccatgcaatgactaaaaaaacgcacatctgctgaagcagcagcaacaccagattaaaatcgtacatacccgcaaaccacacttccctttaaaacgcgtaacatacattgcctgcgtttaactttctttgaactcttgcagaaaaatgagaattcgtgagtacgatcactcaaaatcgcctggcaaaaataaaatcaccctatagatgcacaaaaaacgggcaaaactacctggttcgcaaaactgcgtctaaagttaaaccgggacctcgcgagcaagggtgagacgatggcgctttacacaattggtgaagtggcgttgctttgtgatattaatcctgtcacgttacgcgcgtggcagaggcgttacggattgctgaaaccgcaacggacagacggcggtcatcggctgttcaacgatgccgatattgaccggatccgcgagatcaaacgctggatcgacaacggcgtgcaggtcagcaaagttaaaatgctgctcagtaatgaaaatgttgatgtgcagaacggctggcgcgatcagcaagaaacattactgacttacctgcaaagcggcaatctacatagcctgcgaacgtggatcaaagagcgcggtcaggattaccccgcccagacactcaccacacatctgtttattcctctgcgccgacggcttcagtgccaacaaccgactctccaggcgctgctggcgatcctcgacggcgtactgatcaactacatcgccatttgtctggctagcgcacgtaaaaaacagggtaaagatgcgctggtggttggctggaatattcaggataccacccgtctgtggctggagggctggattgccagtcaacaaggatggcgcattgatgtcctcgcccacagcctcaatcaactacgccctgaactattcgaaggccgtacattgctggtgtggtgcggtgaaaatcgaacctccgcccaacagcagcaactcaccagttggcaagaacaaggccatgatattttcccactcggcatttaatgattcgttaacaaatgcgctttactgtacaatcctttcgttaacataaggagtgcattatgcgcatagctaaaattggggtcatcgccctgttcctgtttatggcgttaggcggaattggtggcgtcatgctcgcaggttatacctttattttgcgtgctggctaagcgcctgcaccagcctttcaaacaggcggtctgcgatgatcgccgccagtgccaccagtaacgccccctggatcacatacgcggtattaaatccgctaagcccgatgatgatgggcgtacccagcgtgctggcccctaccgtactggcgatcgtcgccgtaccaatgttgataatcacgctagttcgcacgcccgccagaatcaccggagccgccagcggtagctcgaccttacgcactcgctgaccacgactcattcccatacctttcgcaacttctgtcacgctggcatcaatcgctcccagcccggcaagtgtcgcctgcaggacgggcagcacaccgtaaaggatcaaggcgataatcgctggttgcagaccaaagccgatcaccggaacggcgatcgccagcactgcgacgggcggaaaagtctgtccaacggcggcaatagtttccaccagtgggcgaaattccgcgccccacgggcgagtgacagcaattccggcaccagtgccaatgatcaccgcaaacaaactgctaattcccaccagccagaaatgagccagtgccagagctgcaaaactttcttgctgataaacgggtcgtggcagttgtgggaacaaggcagcaaacagcggctggctgtaaggcagccagaaaatcagcgccacaaacagagcaatgagccagaacagcggatcgcgcaacatcttcatacgcttacgcctccaccagcagatcctgaaaatgcagcgtgccgcaaggctggccctgcatgttcaccaccggcagcacctcgcatccccgcgcaacaaacagagagagcgcatcgcgtagcgtcatctcttctgccagtgcctcaccatctgctcgttcttcgcgacgcacgtaatccgccacactacgtaagctaagcaggcgcacacccagttcactacgtccaaaaaactggcggacaaaatcattcgccggacgagtcagcatcgtcagcggattgccctgctgcactacttcaccgtgatccatcaataccagatgttctgccagccgtagcgcctcatcaatatcatgagtgaccagcacaatggtacgccccagcaaacggtgaatgcgcgtcatctcttgttgcaacgcgccgcgcgttaccgggtccagtgcgccaaaaggttcatccattagtaagacttgcggatcggcagccagtgcacgcgccactcccacacgttgctgctgaccaccggaaagctgatgcggataacgctcacgcaaattactctccagccccagtagcgccattaattcgtcgatacgatcgtcaatccgcgcccggctccatttttgtaattgcggcacggtagcgatgttttgcgccacgctccagtgggggaacaggccaatagattgaatggcatagcccatccggcggcgcaactccagtactggcaggctgcgaatttcttctccggcaaagcggatctctccgctgtcatgctccaccaggcggttaatcattttcagggtggtggatttgccggagccagatgtgccaatcagcacgctaaaactcccttcctgaaaattgagattgagatcgttaacggctttttgtgcgccgaacagtttgctgacatggctaaattcaatcattacgtttcaccttcagcagtgcgataagcaaatcgaacagcgcgtcggtaagcaccgccagaacaattaccgggatcacccccagcaacactaaatcaatggcgctgcttagcagcccctggaaaaccagcgcaccaaaaccgcctgcgccgattaacgccgcaatcaccgccatacctacagtttgcaccatcaccacccgcaggctgcgcagaaataccggtaacgccagcggtaactgaacatgcaggaaacgctgcgccccgctcatccccatcgctctggcgctttccagcacatcgcgcgggatctggttcaaaccgactaccacgccgcgcaccagcggcagcaaggcatagagcaccagcgcaatcagtgcgggtgtcattccggttcctgctatgccgagcgtccccagccacggaaaggccgtaaccagcgcggcaagcggcgcaatcaacaggccaaagagcgccacgctaggcacggtctgaatcacattgagcagagaaaaaattgccccctgccgagcagtggaaaagtagcaccagatgcccaacggcacaccaatcactaacgcaggcagcaccgcaccaaacagcaacgtcagatgttgtgccagcgcgtcgtcaaacacatcctgacggttggcgtattctttcattagactgagatcgttaagcgtgccggagtacagcaaccacagcggaataatggcaatctgcatatgcaacaaccagcgccacagcggatgcgtggagattcggcggatggcatcgctacaggccagcaatgccagcgccgcagccagccagaaaccactgccgaggctggtacgcgccagcgcactgccattttgcgccagttgggtcgccgcctttccagctccccacaccagcaatacgaagacgaattgcgccagaatgagtgcacaaatgctgccttttttaccgggaataaaacaggccgtcagccaggcgcaaccaacgcccaccagcatccagatcgtttgcggccacagctgccagagatgacgcccctcaccgctaactaaacgattaggcgcgtaactgataaacggcagcgccgctgcgattgccgtcagcaacagcagcagcgccagaacaggattaatacggaaataagtcacgggaaattacttcgtccaccctttttgtttcaggtagtcggcagccacttttttggcatccagtccttccacagcaatgctggcattcagttgctgcaatgtttttgcatcgaggctggcgaagactggctgtagccactgtgccatttgcggatactccctcaacacgctctcacgcaccactggtgcaggcgcgtagataggttgcacaccttgcggatcgcttaaggtttgcagccccagcgccgctaccgggccgtcagtgccgtaagccattgcagcattaacgccagaggtttgctgggcagcggctttgatcgtcaccgccgtgtcgccaccagccagactcagcaactgatcctgaccgagcttaaagccataggctttttcaaacgcgggtaacgcatcggcgcgttcgataaactctgcgctggctgccagtttgaaggtgccgccctcttgcagataacgactcaggtcggcaaggctagtgagtttatttttctctgccacatcctgacgcacggcgatagtccaggtgttatttgcaggcgcgggcgtcagccagattaacttgttgtgctcgctatcgagctttttgactttctcgtaaccttgctgcgcgtttttccacgctgcatcgttttcatctttaaagaagaaagcgccattgccggtatattccggatagatatccagttcaccggaagtaatcgccccgcgcaccacaggagtcgttccgagttgcactttattcaccgtcggtacgccgtggctttccagcacctgcaaaatgatattgccgagtagcgcaccttcggtatcgattttactaccgactttaacgggggaagccgcctgtagcggcaggctcacggctgccaacataaccagactacctgcccagagctttaagagtggcatgatgctttcctcattcttttactgttgttttcagcgaattaagagaaaagcatagttgataatggcggggttagcttgagcggaaggattcagttgcagaatcagataaatacttaagaggcatattcggtccggcgtttcctgccggatgcggcgcgagcgccttatccggcctacaaagggcgcaaacgtcgcgcccttactaaagcattacagcaactcaaactcgcctttcttaacgcgtgcggaatcagtgccgataaagacattgaacttgccaggctcggcgtcatatttcatctgttgattccagaacttcagcgcctcaatatcgatcgggaagctgacagtctgagtttcgcccggtttcagggtgattttctcaaagcctttcagctgtttcacagggcgactcatggaagccgtcacatcctgcaagtacatctgcactaccgtggcaccctcgcgcttaccggtgttcgtcacctgcacgctggcagtcactttgccgtcacgcttcatggtcggcgcagaaagtttcacatcagagacggtgaaagtggtgtagctcagcccatagccgaacggatacaacgccccgttagcttcatcaaaataacggctagtgtatttgttcggcttgtcggcattatacgggcgaccggtattcagatggctgtagtacaccgggatctgcccgacagaacgcgggaaggacattggcagcttgccggacgggttgtaatcgccaaacaatacatcggcaattgcattaccgccttcagtccccgcaaaccaggtttccagaatcgcatcagcctgctgatcttctttcaccagcgccagcggacgcccgttcatcagcaccagcaccagcggtttaccggtggctttcagcgccgcaatcaagtcacgttggctttgcggaatagtgatatcggtccggctggaggcttcgtgcgccatcccctgtgcttcaccgactacagccaccaccacatcagattgtttcgccgtctgcaccgcttcatcaatcatctcttgcgggctacgcggatcgactttgaccgcttcttcatactgattcaggaaatcgataatgcctttgtcactggtaacgttcgcccctttggcatacagcactttaccgttttcaccgacggcatttttaatcccggtcagtacggtcacggattgatcggcaacaccggctgcggaccagctgcccatcacgtcacgtttactgtccgccagtggcccaaccaccgcaatggtggcgctttttttcagcggtaacgtttcgagacggtttttcagcaacaccaagctttcgcgcgccacttcacgcgcttctttacggtgcaggcggctttcggcattggtatccaccgggtcagactctttcggccccaaatggctgtatgggtcgttaaacaaccccatatcatatttaacgttcagtacatggcgggcagcatcgtccagctctgccatcgtcactttgccggatttaatcaacccaggcagatacttgctgtagtactcgtcgctcatgctcatgttgattccggatttcagcgccacgcgcaccgcatcttccgggtctgccgccgtgccatgtttaatcagctctttgattgcaccgtgatcggaaacggtgatgcctttaaagccccactggtcgcgcagaacatctttcagcagccaggaatcggaggtggctggcgtgccgttcaggctgttcagcgccaccatcaccgcgccgctgcctgcgtccagccccgctttgtacggcggcatataatcattaaacaggcgctgcggactcatatcgacggtgttgtactctttaccgccttctaccgcgccgtatgcggcaaagtgtttgacgctggtcatcacgctgtagcgatctgccgggcttttaccctgcatcgcttccaccatggttttacccattgtactggtgagatacgtatcttcgccaaaaccttcggaagcacgtccccagcgcggatcgcggctgacatcgaccatcggtgcccaggtcatattcaggccatcatctgccgcttcataagcagagacacgtccgaccgttttcactgcatcgaggttaaaagagctggccagaccgaggctaatcgggaacaccgtgcgctgaccgtgcagcacgtcgtaagcaaagaaaagaggaattttcaggcggcttaattccatcacctgatcctgcatggcgcggatatcctgacgggttacggtgttgaaaatcgccccaacctgaccgtctttgatcatctcgcggatcgcctctttcgggttatccgggccgacgctgattaagcgcagctgaccaattttctcatcaactgtcattttcttaagcagttcggtgacgaacgcatcccgcgcttcgggcgttaatggatggttgccgaataaatcatccgccagtgctggctgcagggccagactcaccgcgattcctacactacatagccatttcatatggatttttcttcctttgttgcccgacgtggcagcgaaaatggtgcaaaaaccgtagtttgccataagcatgatggagagagaaaaagaatgctcagtttattgtctgaattttcaaaatattcactcgctgaattgttatacaaggcgctattctagtttgtgatattttttcgccaccacaaggagtggaaaatgtcttccatgacaacaactgataataaagcctttttgaatgaacttgctcgtctggtgggttctagtcacctgctcaccgatcccgcaaaaacggcccgctatcgcaagggcttccgttctggtcagggcgacgcgctggctgtcgttttccctggcagtctactagaattgtggcgggtgctgaaagcctgcgtcaccgccgacaaaattattctgatgcaggccgccaatacaggcctgaccgaaggaagcacgccaaacggtaacgattatgatcgcgatgtcgttatcatcagcaccctgcgtctcgacaagctgcacgttcttggcaagggcgaacaggtgctggcctatccgggcaccacgctctatagcctggaaaaagccctcaaaccgctgggacgcgaaccgcacagtgtgattggaagtagctgtataggcgcaagcgtcatcggcggtatttgtaacaactccggcggcagcctggtgcaacgtggcccggcgtataccgaaatgagcttattcgcgcgtataaatgaagacggcaaactgacgctggtgaaccatctggggattgatctgggcgaaacgccggagcagatccttagcaagctggatgatgatcgcatcaaagatgacgatgtgcgtcacgatggtcgtcacgcccacgattatgactatgtccaccgcgttcgtgatattgaagccgacacgcccgcacgttataacgccgatcctgatcggttatttgaatcttctggttgcgccgggaagctggcggtctttgcagtacgtcttgataccttcgaagcggaaaaaaatcagcaggtgttttatatcggcaccaaccagccggaagtgctgaccgaaatccgccgtcatattctggctaacttcgaaaatctgccggttgccggggaatatatgcaccgggatatctacgatattgcggaaaaatacggcaaagacaccttcctgatgattgataagttaggcaccgacaagatgccgttcttctttaatctcaagggacgcaccgatgcgatgctggagaaagtgaaattcttccgtccgcattttactgaccgtgcgatgcaaaaattcggtcacctgttccccagccatttaccgccgcgcatgaaaaactggcgcgataaatacgagcatcatctgctgttaaaaatggcgggcgatggcgtgggcgaagccaaaagctggctggtggattatttcaaacaggccgaaggcgatttctttgtctgtacgccggaggaaggcagcaaagcgtttttacaccgtttcgccgctgcgggcgcagcaattcgttatcaggcggtgcattccgatgaagtcgaagacattctggcgttggatatcgctctgcggcgtaacgacaccgagtggtatgagcatttaccgccggagatcgacagccagctggtgcacaagctctattacggccattttatgtgctatgtcttccatcaggattacatagtgaaaaaaggcgtggatgtgcatgcgttaaaagaacagatgctggaactgctacagcagcgcggcgcgcagtaccctgccgagcataacgtcggtcatttgtataaagcaccggagacgttgcagaagttctatcgcgagaacgatccgaccaacagcatgaatccggggatcggtaaaaccagtaaacggaaaaactggcaggaagtggagtaaaaattacggatggcagagtatcgccatccgaattcacttaatcgttctgtgccgtctgccccgccgccgccatttgggcggctttttgttttttatagctcaacgctgctgccggcacaggcatcactttaccggtttcaatccaggtacgcaggcggctggcatcggcaaaatgggtatatttgccaaacgcgtccatcactaccagcgccaccggtttattattgataaccgtacgcatcaccagacaatggcccgccgcattggtaaagccggttttggttaactgaatattccagttatcgcgatacaccagatgattagtattgcggaacggcagcgtatacgtcggattagagaaggttgccatatcttcccgggtagtacttaactgcccgatcaacggatattgtttgctggcaatgagcagtttggttaagtcacgggcagtactaacgttatgcacgctcaatccggtaggttcaacaaagcgcgtgttgttcattccgaggcttttcgctttcgcattcattgccttaataaaggctttgtaaccaccgggataatggtgcgcaaggcttgccgccgcgcggttttcactagacatcagcgccagcaacagcatatctttacggctgatttcgctattcagtcgtacgcggctatagacccctttcatctccggcgtctggctgatatccacttttagtttttcatccagcggcagtcgtgcatccagcacaaccatcgcggtcattaatttgctgatagacgcaatcggacgcaccagatccgggtggttgctatagatcactttgttggtattcagatcaacaatcatcgcgctaccggaggcaatttccggttgactagcggtggtagcggctgccgttttcgcaacggcctgcggtgcaaaaggcacagccagcatcagggccaggctaaataaagaaactcgaaatttcggcatgatgagcattcagatagtggttcacgcgcacgggttgcgcaccgccggagtaaggatttactgaggctagcgacgccatcataacgagcaaaaagtgcgatcgtcaaaggagaatcgtgaggaaatgctgcattgctgacatttacgccagcaatgcaacgtcaaagaactttttagaacaaacgataaccgtagccccatagtataacggttagggcgagcagcacttccagtaccagcacgccaatcgccagcgtgctactagagaagctaaggccttcctctttgttgatattcaggaagctcggaataccaaggtaaagcaggtagccggtgtaaaacagcgccaccgtgccgaccagcgcacacaaccagaccagtggataaagcgccaccagaccgcttaaaaacagcggagttgcaacgtagcccgcgaagaccatgcagtgcgcaagactcggacgctgcggataattacgcgccatccaccagatgacccgccccatcaccgcgaccccagccagcataacgccgtaaaacaagacagccagcgccagtccggtaaaccaggataacttcaggatagtgccatcgccaaaattccagccaatctgtgtagtgccaatgaaggcgcaaatcaccggaatcgccgccatcagcaaaacgtggtgggtgtaatggtgagaaatcgtttcgttttcgcgattaatcacctgcatttcacgatcgggatgggaaaacagtccccagacatggctcataccgcccccttgttgtgagttcatgaacctgacagttcaagtataagtcagcttgtgattattttttgttcgcccatgtaattttcactgtctgatgaacgtcctttttcagcgtgaatgattcacagggtgtatgcttactggcaaccaaagggagacagactggcctatggatctcaatacacttatcagtcaatatggttatgccgcgctggtgatcggtagcctggcggaaggtgaaaccgtgactttgctgggaggcgttgcggcgcatcaggggctattaaagttcccgctggtggtactttctgtggcgcttggcggcatgattggcgaccaggtgctctatctgtgcgggcggcggtttggcggcaagctgttacgccgtttcagcaaacatcaggataaaattgagcgggcgcagaaacttatccaacgccatccgtatctgtttgtcattggtacgcgctttatgtatggctttcgggtgattggcccgacgctgattggtgccagccagctgccgccgaaaatctttctgccgctgaatattctcggcgcatttgcctgggcgttgatttttaccactattggttacgctggtggtcaggtgattgcgccgtggttgcacaatctcgaccagcatttgaagcactgggtctggttgattctggtcgtggttctggtggtgggcgtgcgctggtggctgaaacgacgcgggaagaaaaagccggatcatcaggcgtaaaaccattgccctggataaggcgttcgcgccgcatccgacatccggagtaccatgcctgatacgacgcttgtgcgtcttttcatgccgaccaaaatattacccaatgaaatatccacgcacctcactgcgttattctgggttgaactgtggattcgccaacataaagccgccatccactatcaagctctgcccggtggtgtaatttgcgccctcgctacaaagccacaccaccaggctggcaatctcatgcgttgcgccaaaacgccgcaagggaatgctaggctccgcgtcgggcttcacgtcgctgtcatccatgccattcattggcgtggcgatcgccccaggcgcgactgcgttcaccaaaatcttatgcctgaccagctccagcgccatcgctttggttaacccaccgagcgcatgtttagcggctgtgtaggcgctggcatccggcagcggcgtatgttcatgtacgctcgtaatgttgatgatgcgaccgccctgcccttgtttcaccatctgacgagccgcaatttggctgcataagaatgcaccatcgacatcaacggtaaaaatcttgcgccactcatcaaaagccatatcaagaaacggcgctttggtcattgcacccgcattattcaccagcacatcaatgcgccccagccgttgaatgagtttctccagcgccagtgccccttctggtagattgccgagatccagctgcacgatctccgcacgtacgccgtggctaactacctcacgcgcggtatcttttgccccttcttcatcactgtgccaggtaataccaatatcaaacccctgctgcgccagtaataacgcgcactctttgccgatcccgctatcggaggcggtaataatcgcaacctgtgccatcgagttctccacttaacgctgaataaacgttaagtatagaaggcgcatatcatcagcgtttgtaccccccgcccaacgcaccagtgagttgaatggaggcatccagccactgcccttgcaataacaggccattggcccgctcacgcagcgcggggattctggcttcgctgacgcgggaaccagcaatgatgcccgcgttaaagcgcgcctgcgcaagacctaccacacgcaaggcatcgcgctcaatttgcgcctgatgctggtttttctccgccagtgtctgaacctgactggctgcccgcgccacgtcattcaccgcttcaaccaccgctttgttgtagctggcgatagacaagttgctttcggcttttgcgatatcgagattggcgttaagacgaccactatcgaaaatgggtagcgtcaggcctgccgtaacgcccatttgctgcgcggaatgacggaacagatcgcttaagtgcaacgcatcctgttgcaggaaggccatcaggttgatgtcaggataaaatgccgcttttgccgcatcaatggtgcttaggctactctcaacgtaccagtgcgccgcctgcaaatctgcccgccgggccagtaaggagtaccccagttcatcaggaagctggcttgccactttcggcaacgcgaccggtttaagcttcaaactctttgtctggttatttgtaagtgcgcttaaccgtgcctcaataattttcattttccccgcgacatcgttgagctgctgccgggttttgctggcattaatatcggtttccacaccttcaacactagaagtaatcccgttctgatatagctggcgatcggtcgcgataatggtgttctgctctttttctatttgctgcaagaccgtgtttaacgccgcctgggtttgccactcccagtacaggcgggctacgctgccagccagcaattggcgggtttgctcgcgttccgccgcccgtgctttaaccgtacccaggcgggcagtaacctccgcccgattctttccccagatatcgagatgccagcccgccgttaagccaaaagtaccgttggtgtaccacgggccggtcgtacctgcggccggatcgttcagagcaaacggccccattaagccttctgcgctcattttttgccgctccatatccgccgaaaagtcgatctgcggaccatcctgagtggcaactgccttcgcctgggcttcagctagctgaatgcgctgttcagccacctgcatatccggtgcgttctgtagtgcattgttaattaaggaagactgttgattatcgtgatactccagccaccattggctgtctggccaaccattttcagcgccgtgggtaatgcggtgtcaacttgtgcagcgggcgtttgctggcttaacgcctggcgggtttcatgcataggcgcacacccggccagcatcagtaacagcggaaaacaggcgatggctggataaaaggaatcacgattcatgggggaataatcaggtaagaaaaggtgcgcggagattaccgtgtgttgcgatatattttttagtttcgcgtggcaatacatcagtggcaataaaacgacatatccagaaaaatatacactaagtgaatgatatcttccgatttatcttaatcgtttatggataacggcaaagggcttcgttttttcctatacttattcagcactcacaaataaaggaacgccaatgaaaattatactctgggctgtattgattattttcctgattgggctactggtggtgactggcgtatttaagatgatattttaaaattaattaatgtcatcaggtccgaaaataacgagaatatttcagtctctcatcctgttgcgctcctgtcatgtgcattgcttcatataatcactggcgcaaggagcgcgcagggggcggccaatcgccgccgccccctgcacccccgggctctggcgaacaaaatcgccgctgcgcggtgccctcggcttatcccttacggctaccgggtcgggcgcgaggtaacatccctgtaaaacgcgccctcagcccacatccatgtgggctgccccggccttcagggaacgcctcggcaattttgacgccaccaaacaaccgtgcggcctattgataaagagctaacacattgtcaaaaaacatcactatggttttttagagtttctcgatatcaattgcctgaatagcccttgcaatatcaggggaattattcaacacccgaacatgctgaaataattccgttgcttcatcgtattctttacgcaaataactcaaccactgtttaatccgcgcaacgtgatataacccggtatcgccctgcttttccagacgggtatatttttgcagcaaagcaaccacctccggccacggcattcgcggttcgttatattttaccacccggctcaggttgggaatattgagcgccccgcgaccaatcatcactgcgtcgcagccgctgatcgccatgcattgttgcgcgctctgccagtcccagatttcaccgttggcaatcaccggaatattcagccgctggcgaatatcgccaatcgcctgccagtcaatatgctccgcgcggtaaccctgctctttcgtccgcccatgcaccaccagctccgtagcgccagcctgttgaaccgcatcggcgatttcaaatttcttctcaccgctgtcccagcccagacgcactttcacgctgacgggcaaatgcgccggtacagcttcacgcatcgcttttgcaccctggtagatgagttcaggatctttgagtaacgtcgccccgccgccgctaccgttaaccgttttgctcgggcagccgcaattgagatccacgccccaggaacctaactccaccgcacgggcggcgttctctgccagccattgtgggaactgacctaacaactgcacgcgcaccagcgtaccagatggtgtccggctggcgttttgtagctcagggcaaatgcgatgaaagacttttaccggcagcagttgatccaccacgcggacaaactcggtgatgcacagatcgtagtcgttaacttcggtcagcaattcacgcaccagagagtcaagcactccctccatcggtgccagtaacacacgcatatcatcacccgcaaaaaaatgaggcgctatgttagcgcctatggtcagcggattaaaggtctgcaaagagggattgctgcaaactgcaatccctctctatgcttgatgtatgcctgagttcgctgcgcattgcgtaatgccggggagcgaaaaaataagcgctgatttcttaatgtgatcggtagcacgttttacgaattaattgtatgatgaatccatctcatctggggtgttgattatgagtaagacactgaacattatctggcaatatttacgcgctttcgtcctgatttatgcctgcctgtatgcaggcattttcattgcttccctgctaccggtaaccattccgggcagcatcatcgggatgctgatcctgtttgtcctgctggccttgcaaattcttccggcaaaatgggtcaatccggggtgctacgtactgattcgctatatggcgctattgtttgtgccgattggcgtaggcgtcatgcaatattttgatttgctccgcgcacagtttggcccggtagtggtttcctgtgcagtcagtacgctggtggtttttctggtggtgagctggagtagccaactggtacacggtgaacgtaaagtcgtaggtcagaaaggaagtgaagaatgatggcgaatatctggtggagtttaccgctgacattgattgtcttttttgccgcccgcaaactggcggcacggtataagtttcccttgcttaacccgttgctggtagcaatggtggtgatcattccttttttaatgctgactggcatctcttacgacagctactttaaaggtagcgaagtgctaaacgatctgctgcaaccggcggtcgtcgcgctggcctatcctttatatgagcagctacaccagatccgcgcgcgctggaaaagcatcatcaccatctgttttatcggcagcgtggttgcgatggtgacggggacttccgtggcattgttgatgggcgctagtccggaaatcgccgcgagtatcctgccgaaaagtgtcaccacgcctattgcaatggcggttggcggcagtattggcggtattccggcaatcagcgcagtttgcgtgattttcgtcggcatcctcggcgcggtatttggccatacattgcttaatgcgatgcgtattcgtaccaaagctgcgcgcggtctggcaatggggactgccagccacgccctcggtacggcgcgctgcgccgagctggattatcaggaaggtgcatttagtagcctagcgctggtgttatgcgggataattactagcctgatcgcaccgttccttttcccgattattctggcagtaatgggctaaaatttgcgatgcgtcgcgcatttttgatgtatgtttcacgcgttgcataattaatgagattcagatcacatataaagccacaacgggttcgtaaactgttatcccattacatgattatgaggcaacgccatgcatccacgttttcaaaccgcttttgcccaacttgcggataacttgcaatctgcactggaacctattctggcagacaagtacttccccgctttgttgaccggggagcaagtcagtagcctgaagagcgcaacggggctggacgaagacgcgctggcattcgcactacttccgctggcggcggcctgtgcgcgtacgccattgagcaattttaatgttggcgcaattgcgcgcggtgtgagcggaacctggtatttcggtgccaatatggaatttattggtgcgacaatgcagcaaaccgttcatgccgaacaaagcgcgatcagccacgcctggttgagtggtgaaaaagcgcttgcagccatcaccgttaactacacgccttgtggtcactgccgtcagtttatgaatgaactgaacagcggtctggatctgcgtattcatctgccgggccgcgaggcacacgcgctgcgtgactatctgccagatgcctttgggccgaaagatctggagattaaaacgctgctgatggacgaacaggatcacggctatgcgctgacgggtgatgcgctttctcaggcagcgattgcggcggcaaaccgtagccacatgccttacagtaagagcccaagcggtgtcgcgctggaatgtaaagacggtcgtattttcagtggcagctacgctgaaaacgccgcattcaacccgactctgccaccgttgcagggagcgttaattctgttgaatctcaagggttatgattacccggatatccagcgcgcggttctggcagaaaaagccgatgcgccgttgattcagtgggatgccacctccgcaacgctgaaagctctcggctgtcacagtatcgaccgagtgcttctcgcttaagcctggtgccggatgcggcgtgaacgccttgtccggcttgccagccctctcctggtgtcgaaattcccggcaaacagtttgccgtttcttgcgcaaaaccagcgggtaaagtagcctgatggaaattttccttagatcgagtctcctgcatgttaaagcgcgtgttcctcagcctgttagtcctgatcggcttgctgctgttgactgtgctcggcctcgatcgctggatgagctggaaaaccgcgccttatatctacgacgaattgcaggatctcccctaccgccaggtcggtgtggtgctcggaacagcaaaatattatcgtactggcgtaattaatcagtattatcgctaccgcattcaaggagcgattaatgcctataacagcggtaaggtaaattatctattactgagcggcgataacgcattgcaaagttataatgagccgatgaccatgcgcaaagatttaatcgctgctggtgtcgacccaagtgatattgttctcgattacgcaggctttcgtacgctggattccatcgtgcgtacacgcaaagttttcgatactaatgatttcattattatcacccaacgtttccactgtgagcgagcattatttattgcgctgcatatggggattcaggctcagtgttatgccgtaccgagtccgaaagatatgctgagtgtacgtattcgtgaatttgccgcccgtttcggtgcgctggctgacctttatatttttaaacgtgaaccgcgttttttagggccgctggtccctattccggctatgcaccaggtaccggaagatgcgcaggggtatcccgccgtcacacccgaacagttacttgaattacaaaagaaacaaggaaagtaattatggatgtacagcagttttttgtcgttgccgtttttttccttatcccgatattttgtttccgcgaagcatggaaaggctggcgcgcaggcgcgattgataaacgggttaaaaatgcaccggaaccggtgtatgtctggcgagcaaaaaatcccggactctttttcgcttatatggtggcatatatcggcttcggaattttatctatcggcatgattgtttatcttattttctatcgttaatattcccctctccagttaattattgagaataattattacttcacctgataagctgcggatatcacattcctaaccgcagctatttgtgaatcttttcacagtttaaattcccccgcacgcttagccttaatatcagtacattattatttactaaacgctcgccttaattacctatagcattaaggaagatcacatgccgcaacaaaattatctggatgaactcactccggcttttacgtctttactggcgattaaagaagcctctcgctgtttattatgtcacgacgctccctgtagtcaggcttgcccggcacagaccgatccggggaaatttattcgcagtatctactttcgtaattttaaaggcgctgccgagacaattcgcgaaaataatgccctcggtgccgtttgtgccagagtgtgcccgacggagaaattatgccaaagcggttgtacccgtgccggtgttgatgctcccattgatatcggccgcttacagcgttttgttactgattttgaacaacaaaccggaatggaaatttatcagcccggtactaaaacgctcggcaaagtcgcgattattggcgcaggtcctgccggattgcaggccagtgtgacactgacaaaccagggttatgacgtcacgatttatgagaaagaagcgcaccccggtggctggttgcgtaacggtattccgcaattccggttaccgcaaagtgtgctggatgcagagatcgcccgtattgaaaaaatgggcgtgaccattaagtgcaacaacgaagtcggtaacacactcacccttgagcagctgaaagcagaaaaccgcgcggtactggtcaccgtggggttaagtagcggttccgggctaccgctgtttgagcatagtgacgttgagattgccgtcgacttcttgcaacgtgcacgacaggcgcaaggcgatatcagcattccacaaagcgcattaattatcggcggcggtgatgtcgcgatggacgtagccagcacgctgaaagttctcggctgtcaggcggtaacttgcgtagcgcgtgaagagttagatgagtttccggcaagcgaaaaagagtttaccagcgcccgggagctgggcgttagcatcatcgatggattcacgccagtagccgtggaaggcaataaagtcacgtttaagcatgtacggttaagcggcgaactgacgatggcggcagataaaattattctcgccgtcggtcagcatgccagactagatgcctttgcggagttagagccgcagcgtaacaccatcaaaacacaaaattaccagacccgcgacccgcaagtctttgctgctggcgatattgttgagggtgacaaaaccgtggtctatgccgtgaaaaccgggaaagaagccgccgaggcgattcatcactatttagagggagcttgcagttgttaaattaatatttagagggagcttgctcatgttaacgaaagatcttagcattactttttgcggcgtgaagtttcccaacccgttctgcctctcttctagcccggtaggcaactgctatgagatgtgtgccaaagcctacgacacaggttggggcggtgtggtgtttaaaacgatcggcttttttatcgccaacgaagtcagcccgcgttttgatcatctggtgaaagaagataccggttttatcggcttcaaaaatatggagcagattgctgaacatccgttggaagagaatctggccgccctgcgtcggctgaaggaagattacccggacaaagtattgatcgctagcatcatgggggaaaatgagcagcaatgggaggagctggcgcgcctggtgcaagaagctggcgcggatatgatcgagtgtaacttctcctgtccgcaaatgacttctcatgcgatgggtagcgatgtcgggcaaagcccggagctggtagaaaaatattgtcgggcagtgaaacggggttccacgctgccaatgctggcgaagatgacgccgaatatcggtgatatgtgcgaagtggcgctggcggcgaagcgcggcggcgcagatggcattgcggcgattaacaccgttaaatccatcaccaatatcgatcttaatcagaaaatcggtatgccgatcgttaacggaaaaagcagtatttccggatattccggtaaagcggtaaaaccgatcgccctgcgcttcattcagcaaatgcgcacccatccagaactgcgcgatttcccaatcagcggtatcggcggcattgaaacctgggaggatgcggctgagtttttattgctcggcgcagcaacgttacaggtgaccaccggcatcatgcagtacgggtatcggatagtggaagatatggcaagcgggttgagccattatctcgccgatcagggatttgatagcctgcaggagatggtaggtctggcgaataacaatattgtcccggcggaagatttagaccgcagttatattgtctatccccgtatcaatcttgataaatgtgttggctgtggacgctgttatatttcctgttacgacggcggtcaccaggcgatggaatggagcgagaaaacccgcacaccgcattgtaataccgagaaatgtgtgggttgtctgctttgtggtcacgtctgcccggtgggttgtattgagctcggggaagtgaagtttaagaaaggcgagaaagaacacccggtaacgttgtaaaaccagagacgcatccggcatttggttcctgtcgccggatgcggcttgaacgccttatccggcctacaaaaccatacaaatcagtatgttgagcttattgtaggccggataaaacgcgccagcgttgcatccggcatttggctcctgttgccggatgcggcgtgaacgccttatccggcctacaaaaccacacagatcatgatgttatgtgcgtttatgaccgaatgcggaccacattcacatcatttcttacgcgcgtatttcagactatccagcgctacggcgaagataataatcgcccctttgatgatgtactgccagtatgggtttacgccgatatacgtcaggccatagttgatgacggtaaaaataattaccccggtcaccacgccaatcaccgtccccacaccgccgctgaagcttacaccgcctaccacgcacgccgcgatagcatccagctcatacataaagccgaggttgttggtggcagagccgatacgtccggcttctaacatcccgccaaaggcatagaacacgccagacaacgcgtagatcatcagcaggttcaggccgacgttgacaccagatacttttgccgcttccgggttaccgccaatggcaaaaatgttcttaccgaagcgggttttgttccacaacacccagacgaacgccaccgcaatcaacgcgtagaaggtgatgtaagagagacggaaactccccagcgcgacaaagccctgagcaaaggtagagaagccactgtcaaaaccagaaattgggctcgccccgacaaagtcgtaatagaggctgttgatgccatagacgatgatcatcgtgccgagcgtggtaatgaacggcgtcacgttgagataagcgataatcagaccgttgatcaaaccgatcaccgcaccaatggcacagacaatcagaataaccagcgcaatcggcatcgtcgccatttccgggaacactttgttggcgttatccatggactgcaataatgtcgcagccaccactgccgccagccctacctgacgaccagcagaaagatcggtcccctgggtgacaattaaccctgccacaccgagcgcgataataatacgcacgctactctgggtgagaatattacttaagttcaacagacttaaaaatgttgggtcctggaaaataataatcgccagcaaaactaaaagaacgacgtaaataccgccctctttcaggtaagtaagaaaacttttcttatttaacgcactcatgggaagcccctaatcttaaaggtgcaaagacgcaagacgcagaatttcgttttgcgttgttgtttttgtatcgacaattccggaaacgagaccattgctcatgaccagaatacggtctgttatccctaacaactcaggcatttcagaggagataataataatccccttgcctttcttcgccagttcggcaattaactgataaatttcaaacttcgccccgacatcaataccgcgcgtcggttcatcgagcattaatatttctggttgcgttagtagccagcgaccaataatcaccttttgctgattaccaccggagaggctaccaatttgcgtccgatgacccggcgtttttacccgcatgctatcaatcacccactgggtatcgcttttcatccggctgttatccagtaaaccaactttatttttgtagttgcgaatattggaaattaagctgttaaaaccaatatccagataggcataaattcccgtactgcggcgctcctcagttaccagtgcaaatccatggtttatggcttcgttggcattatggttattgatctgtttgccgtgcaacgttatggtgccagcgcttttctcgcgaataccaaataacgtctcaacaatatcggtacgtttcgcccccaccagaccggcaataccgaggatctcccctttatgcagatcaaagctgacatcgcgaatgctcggctggcgcagactcgtcaggttacgtacctcgaggatgacttcgcccggtttgttttctttgtcagggaaacgctggttaagagaacgcccaaccatcatggcgatgatcttgtccatcgtcagtcctgccagcggttcggtggcgatccactgaccgtcgcgcaatacggtaacttcatcacataactggaagatttcttccattttatggctgatataaacaataccgcagccgcgctcttttaatttacgaataatagtgaacagatgattgacctctttttcggttaagctagaagtcggttcatccataatcacaattttcgcgttataggaaaacgctttggcgatttcgatcatctgcatttggctaacggataatgtgccgacgcgcgcacgcggatcgatatcaatatccagttcgtcaaaaatcgctttggtttcgcggtacattttgtcctgatcgacaaacatgcctttggtgggatatcgccccagccacatgttatccatcacgctacgttgtaataccaggtttaactcctggtgtaccatgctaataccattttccagggcttcttttgcagaatggaaatcgatctctttaccctggaataaaatggtgccggagtctttttgataaataccaaacaggcattttaataatgtgctttttcctgcaccgttttcccccattaatgcatggatagaatgtggccggacttttaaattaacgttatcaagtgccttaacaccaggaaaggacttgttgataccgctcatttccaacaagtattccccggaggacggagtcgtactgctgaccatataattttaccttgttggccatacaataagggcgcagtaatagactgcgcccaatcagtcttatttcttgctgaattcagccaggttgtctttatctacgccaacataaggtacgcggaccactttgttgtcgattttccagttggtgccatcagccgcacctttaccatcggccaggtttttcgccagatcaaaggtcgctttcgcctggttgttagcatcgttcagtacggtgcccgccagtgcaccggatttcaccagcgccagcgcttctggcagcgcatcgacgccaaacaccggaatgctggacttgttgtgtgctttcagcgcttcaaccgcgcccattgccatcgcatcgttgttggcgataaccacttcgattttgttggcgttcgggccagacagccaggcgtccatcttatctttcgcctgagcggtgtcccacattgcggtatctaactgtaactgttcagttttgatgcctttatcgttcaattctttaatcacgtaagtggtacgtgcttctgcatccggatggcccggttcacctttcagcagtacgaactgaatctgaccgtctttgttcagatcccaaccctgattcgccgcccagtgtttagcaatcaaatcgccttgaataatgccggactctttggagtcagtgccaacgtagtaggctttgtcgtagctatccagcgccttacgagacggttctttgttgaagaaaaccaccggcacgttttgcccacgcgctttctcaatcaccgtacccgcagctgccgggtcaaccaggttgattgccagtgccttcacccctttcgccagcaatacgtcgatctgatcgttctgcttggactggtcattctgagaatcattcatcagcagctgaacatctggcgcggctttcgcatcttgctcaatagccttgcgcactacagacataaagttatcgtcgtacttatagattgttacaccaatgcgagtatcagcagcgtgtgcagcggcaccgaataacatgctggccatcacagcagacagggttaacaccttcttattcatggtatctccggtttttcttatgcagggtagtgcttgagataaatgctcggcggggcagtagagttaatgaagtgttactgaacgccgaagctcactttttaaaattcgttcttccatgcccggtaacgctccagaaaacggctttaattgttgttatgacgctgttacctcggcaaaagtgattattcactgttacatacgggttacaacgttaaaacggtgcaatcatagctatcacattgttaagatactgtgaaatcactcacagattgaaagcggttacatcgcctgatttgtactgttagtgatcgccgccgcattctggcgtgttgcgacagaatggcgacgcactaacgtcggcataaaacagtggctggcacgaggatcaatattgcctgctgccccctgcaaggccagttcggtggctaatttcgccatactagcaatgggataacgcacggtcgttaattgcgggtcggtgtaacgggcgatgggaatatcatcgaaaccgatgatactgagatgtaacggaatcgcaatgccattatcttttaatgctgtcagtgcgccagcggccatattgtcgttataagcaaatacagcggtaagttgtagattgcgccccagcagttcaaccatcgccgcctcaccgcccggcatgtccggcgtaccagcgccaatccagctttccggcggaataatatcctgctctttcaacgcactcatccagcctgctttacgcatggcgtcatcttcaatgccgtggctggaagaaagataaccaatacgttgatgaccgttattcagcaacatgcgcgtcgccattcgggcaccgctgagattatccaggcaaacgcaacgatgggcgtaccccggcacaacgcggttgattaacaccataccgggaatgttatccataaattgcgccagttcatcgtcactcaatgctttactgtgaacaatcaacgcattacaacgctggcgaattaacacctcaatggcgtgacgctctttttccgcttcatgatagctattgccgattagcacgtatttctgatgctgctgagcgaccagatccaccgcttttaccagcgcgccgaaaaacgcatcagaaacgtccatcaccaccacgccaatggtgtcgctaacctgagttgccagcgcctgggcattggcgtttggccgataatccagctcactcacggctttcattactgcttcacgcgtgtcggcactgaccagcgtgctgttattgagcacccgggaaaccgttgccacagagacgccagcctgacgcgctacatcacgaatggtgatcatattcactacctgttatgagattgcagtaaatgactgcttgctggcggctattttgtcagcactgaatacaggacttcgtgaatcgagtcacagcaatggaaacggttacagccgttttgttaacgaatgtgatccagatcgttatctacttgttttagatattgccggtccggcagcacgcaaagttaactgacgccagagccattccaccggcccctggcggaagtaacgcagccagataacagagaagaggatattcgccagccataccggaataacaaacgccagcagctccaggcggtcaaaatgcataaacaaaccgaggtggtaaaaaagcgtggtacaaatcagcgtttgcaatagatagttggtcagcgccatccgtccgacgcaggcgatcgcaagcaccagcttaaagcggctcaattgcggccagaagccataaaacaggctcgcatagccaatcgcctgaaacggcgcactcagttcccgcggcatttgaagtaagaaggcacaccagcgatacgcccagtccagctgccattgcagggcgatggcaggaaggttaatggtcaccccaatcgccaccagcacaaaaccagtacgacgatagtgacgtaagctgaactgccctttcagccagccgctgcgcatcagcgccgcaccaatgagcatcatccctgccagttgccagccatactgtgcgcccagtgccagtaaactgttgccaacaccatcggcacgattactgatcgcttcaacgccgccgtgaagcttccagtatttttcatacaaaatagcgcttgcatccggcgtccaggcgcggctggtctggctgtcggaaatcagccccaataacagcaaaacgccaagccccaccagataaagcatgacgcctgtattaaacaggctttttacgcttggcgcatcgcgcaccagccgccagcagattaagcccaccagcccgtaagccagcaaaatatcgccgtcccagaacaataaaccgtgaataaagcccaacaagactaacagcgttaaccggctctggatccagcgtctgccacggggcagcaacatttgcaggcccgcaccaaacagtagcgcaaaaagcgtgaggaatttcacctggccgatgagatcaagaaatgcccaagtccatgcatcccgcggcgtaatagcaccgtaccaggcgggattgagataagccgcctttggtagcccaaaggcgctgatgtttaatagcaggatccccagaatggcgacgccgcgaacaaaatcgagcgtgacgttgcgctccatggttcctgccttttaatcagttgtgatgacgcacagcgcgcagaaactcgtggcgcgtattctgactggatttgaacaatccaccaagagaggtcgttgtcgtggcactggttgcatcgcggatgccacgcgccttcacgcagtaatgcaccgcgtcgatgctgacagccacgttattggtgcccagcagcgtttgtagcgcaataagaatttgctgcgtcagacgttcctgcacctgcggacgctgggcaaagaactgcacaatgcggttaattttactcagaccgatcacgctatctttcgggatataggccaccgtcgctttgccatcgatggtaacaaaatggtgttcacaggtgctggtcagagtgatatcgcgcacggtgaccatttcatcgaccttcattttgttttcaatgagggtgattttcgggaaattggcgtaatccagaccggagaaaatttcatcgacatacattttagcgatgcgatgcggcgtttccatcaaactgtcatcagccaggtcgagattcagcagctgcatgatttcggtcatatgaccagcaataaggcttttgcgcgtttcgttatccatttcatgcacgggcgggcgcagcggtgtttccagtcctcgcgcaactaacgcttcatgaaccagggccgcttctttactgagacttggcatttatgatttctcctgcaggtgtgacgcctccgccctgcgtgggggcaaagttattaagctgatttacagcctgattattgtgcgtgaggcggcgcacataatccagtattcacagcgataattattgtaattgccgctgcctttcatcagcagatgttaaaacatcgttatgcaaatacggaagtgaaagttactcacagcacattgaataaacggtatgatgaagaaattgcaaacaacacaacaaggagccacgcatggaaatgctcgaagagcaccgctgttttgaaggctggcagcaacgctggcgacacgactccagtaccttaaactgcccgatgacgttcagtatctttctccctccacctcgtgatcacactccgccaccagtgctgtactggctttccggattaacctgcaatgacgagaacttcaccaccaaggcgggtgcccagcgggtagcggcggaactggggattgtactggtgatgccagacaccagcccgcgcggcgaaaaggttgccaacgacgatggctacgatttaggccagggcgcaggcttttatcttaatgccacgcaaccgccgtgggcgacgcattaccggatgtatgattatctgcgcgatgaattaccggcgctggttcagagccaatttaatgtcagcgaccgctgcgccattagcggtcacagtatgggtggtcacggtgcgctgattatggcgctgaaaaatccgggtaaatacaccagcgttagcgcctttgcgccaattgtgaatccgtgcagcgtcccgtggggaatcaaagcgtttagcagctatttaggtgaggacaaaaatgcatggctggaatgggacagttgcgcactgatgtatgccagtaacgcgcaggatgcgatcccgacgcttatcgatcagggcgataatgatcagtttcttgccgaccagttgcaacctgcggtactggcagaagccgcgcgccagaaagcgtggccgatgacgctgcgtattcagccgggatatgatcacagttactacttcatcgcctcttttatagaggatcacctgcgcttccatgcgcagtatttactgaagtgaaagtccgcccggttcgccgggcatcttctcatcagaagcgataatccactgccataaagtaacgacgtccgtcttcgttatagctgtagtcgtcacgactgagatccttgtcgccaaggttcagcacgcctgcgcgcagtttgacgtctttagtcacctgccaggccgcgccggtattccagatggtataaccgcccggtgttttagccgtcgcgctgtcggcgcgtttctgcccggtatagtgcccagaaacatagaaactccagtcttccagcgccagcggtttccagtccagcgtaccgttagcagtatggaacggcagatcggatagcggtttgttttcgccgttgctgacatcacgaccatcgttgtaggtgtagttgatgctcagtttccattcatcgttgaacggaattttcagttcggtttccacgccctgaatacgagctttgttaacgttgtagtagctaaataccggtatgcgccgtccgttagcgcccgtctcaaaaccaacaaagttttggtagcccggtgcagcgttgacgtcagacgtacggctgatgctgatacgatctttcacatcgttacggaaaacggtaacgctggattcaaccccttccagccagccttcttcacccatgtagtaaagccccagctcccaactttcgctggtttctggtttcagatccgggctacccacaatcttacatgcgccacggcaggaattgctcgtccagtcagggctaagttgcaacagagaaggtgctttaaatgccgtcgcccagccccctttcaccgttacggtgtcggtggcgttataaaccaggtaggcacgcggactccagtgttcaccgtaggtttcgtgatcgtccatacgcacgccggtcgtcagcgccagcggctcgaagatccgccattcatcttccacaaacagcgcgtactggctggcagacgttttggagctggttcccccggtcaggttcaccgcatcgctaagtttgtcgtgacgccattcaccgccaaccgtgagaaactgattaatcgccgtcagcggcaacgtgtatttgccgtcgaccgtattgctttcggaagttatcgggctgctgttgccagggtttttgttctcgactttctcaccgtagtatttcagttcgctggtgccgtaatcccaacgcccattatggctgacggagtagttctggcgttccaggcggtttttgtccaggctgtcggaatcacgatcctgacggtcgaaaccgtatccggcagtaaaatcgtgattttgattcggtgtccaggcaaattcgacattgccgtcgcggctggagaatccttcaatacgcggcgtttctccggtatcggtggtcgtactgttttgcgggtcatccttttcacgttttgccaggctgccgtaagctttcattcccagcacaccatcaattaatggtccactggtaaagaactgaccgttataggtgtcaccgcgatcgcgatgttcctgaatggtggtatcgacggtaacggtaccgctccatttctgaccgatttttttggtgatgatattcactacaccgccgagcgcatcggaaccgtacaggctgctcatcgggccacggaccacttcaatacgttcgatggaatcgaccgggatccagttcagatcgaaatcattgtggcggaagacggcattgcgggagttcacgcgtttaccgtcgacgagaatcagggtatagctgctgtccagaccacgaatactaacgcccttacggttatccccttcgttcgtcagttgtacgccaggcacttctttgaggacatccttcagattctgtaccggttttcgctgcaggtcttcctgggtaatgacgctgatactggcaggtgcatctttaagattttgttccacggaagatgcagtgacaaccatcgtttcgccatcatcatcgaccgctaacacaggccatgcacaagaaatagcggacaaacacagcccgacccgtacgaaagggttcaacctaaacattccatatctccatgaggtaactacgaaaataaaatgggttatcgctcacatcttcttcacgtccccttgcgtacggcagcatcgcggtggacttattttttatgcaggtgatcatcccagaaagccggaacagcctctgatttgtcagccttttttgattgcggcgtaacgataatgcaaacgataacaattatcaatccaaatgttaaattttatatccgcatgatttgtcagggaaatggaattgaaaaagccctctcggttgagagggcttagcaaggaagggaggaaacttatttcttatcgttctgcgggaacttcatttcgctgtagcgtacgaagtgagttcctttaatcagcttgtagccgaaccaaataatcaggaacagcgggataccaatatacgttgccgctacgccgccccagtcaatagtatctttcaggaacgcttcgtagttctggcccaaagtgataatcagacacagaatgaatgcgaagatcggccccagtgggaagaaaccactacggtacggcagatcgttaatgtcgtgtccctgcaatacgtaaccgcgacggaagcgatagtggctaatggcaatccccagccaggcgataaaacccgtcatcccggaggtgttcagcagccacaggtataccgtctggttgccaaacatggaggtcaggaagcacagaccggcaatcaccgtcgtcgcatacagcgcattacgcggcacgccaccacggctcagtttagcgaaaatgcgcggcgctttaccgtcacacgccagggtgtacagcatacgagtagacgcatacataccggagttacccgcactcagcaccgccgtcagaataactgcgttcatcaccgccgccgcagagagcagacccgcgtgctggaacaccagggtgaacggactaacgctgatgtctttaacatcgttacgcagcaggctcggatcggtgtacggaataatcaggctgataatcaggatcgcgaacacatagaacaacaggattcgccagaacacctgacgtaccgcgcgtggaatgtttttcgccggatcttcggactcgcctgcagcaataccgatcagctcggttccctggaaagagaagccgacaatcatagctacgccgatcatcgccgcaaaaccaccagcaaacggcgcttcgccgattgtccagttgctccagcccgcaggctgcgcgcctttgaagataccgataatcatcagcacgccaacgatgataaagacaataactgtcgtgactttgatcagactgaaccagtattccgcttcaccaaagccacgaacactgatgtagttcagcaggaagataacgccgaggaacaacgcactccagatccagcccggtgtatccgggaaccaccagctcatgaccagctgagctgcaaccaggtcaacggcgatagtcaccgcccagttgtaccagtagttccagcccagcgcgaagccaaagccttcttcaacatagttctgaccgtaagtggcaaagctaccggaaaccggcatatatgcagccagttcaccgagactggtcatcaggaagtaaaccatcaggccaatcagcatatagctgagcaatgccccgcccggacctgcctgagaaatcgttgcgccagaggcaacaaaaagacctgtaccgatggaaccgccaatggcaatcatcgtcaggtgacgcgcctttaattcacggcgtaagcccggcgcttctgtggttttagtttcggaaaccatacaaaaatgctatccatcttaaaaatgaggcgcgattgtagcagacgattggcaatccttccggcagaaatacacggttataagacaccttcatgatcgcccagggattataagtaaagcagccaatctcttttctggcgaatgcatgctgaaggcgctgcgtcacgaaatcgacacagcaccagcatgttcttgtacagcaacttaacgcggcacatttgcgggatcgcaatagtccagaaagcgccgtagcgcgttggaaaggtgtttttgccgatgatgtatacgccacaacgtacgcatcaggcgcggcagagggaccgcaacttcacttaatgtgcctgcctgcaattgatcttcaatcacacgtcggctcaggcaactaattcccaacccatgacgcaccgcatgtttgattgcctcggagttacctaattccatcgccatctcaaacttcggtaaatgactcagcaacagataatcgacaatctcccgcgtgccggaaccgcgttcacgcaggatccacggcgcagcggccagctgttctaaggtgaccggaccacgggccaacgggctagtcggcgcggcgaaaaccaccagctcgtcttccagccacggttcagaaatgatttcagtgctgtggcacggtccttcaataaagccaatatcaacgcggaaatccagcaccgcttgcatcacgtcctggctattcccaacgctaagttcaatcggcaactgcggataatcatggcgataacgggcgataactgcaggcagaatgtagttaccgatggtactactggcatagatacgaatcgcgccgttgtcttcgcgaaacagttgttcgatttcaaccgcctgttcaagcaatgccaacgcacgcggatagagcagccgcccgtgttcattaacaaccagtcttttccccacgcgatcaaacagttgcacgccaagctgcccttccaggtcggtcaaggctgcgctcactgcactttggctcaacgccagcatcacgctcgcctgggtggtacttccacttttcaatacttctgcaaaaacttccaactgccggagggtgatgtgcatagtcgcttaccacttataaagattaattataaatatataatcaattttatttttaaaccagttagtcgtaaccttatgcccggttaaaggagagggttatgacgaatatcaccttacagaaacaacatcgtacactgtggcattttattccggggttagccctgagtgcagttatcaccggggtcgccctgtggggtggttccattcccgcggttgcgggtgccgggtttagtgccctcaccctcgcaatcttgttggggatggttttaggcaacaccatctatccgcacatctggaaaagctgtgacggtggtgtgctgtttgccaagcaatatttattacgtctgggtatcattctttatggcttccgtctgacgttcagccaaattgccgatgtcggtatcagtgggatcatcattgacgtgttgacgctgtccagtaccttcctgctggcttgcttcctggggcagaaagtgtttggtctggataagcacaccagctggttgatcggtgccggtagcagtatctgtggtgctgccgcggtactggcgactgagccggtagtgaaagcggaagccagtaaagtaaccgtggctgttgcaaccgttgttatcttcgggaccgtcgcgattttcctctacccggcgatatatccgctgatgtctcaatggtttagtccggaaactttcggtatctacattggttctactgtgcacgaagtggcgcaggtggtggcggcaggtcatgccatcagcccggatgcggaaaacgcagcagttatttccaaaatgctgcgcgtgatgatgctggctccgttcctcatcctgctggcggcgcgtgttaaacagctgtctggggcgaacagcggcgagaaaagcaaaatcactattccgtggtttgccatcttgttcatcgtagttgccatctttaacagcttccacctgttaccgcagagcgtggtgaacatgctggtaacgctggataccttcctgctggcaatggcgatggcggcgctgggtctgaccactcacgtcagcgcgctgaaaaaagctggggcgaaacctctgctgatggcactggtactgtttgcctggctgattgttggtggtggtgcgattaactatgtgattcaaagcgtcatcgcataaaccactacatcttgctcctgttaacccgctatcattaccgttttcctccagcgggtttaacaggagtcctcgcatgaaatacattggagcgcacgttagtgctgctggcggtctggcaaatgccgcaattcgcgccgccgaaatcgacgcaaccgcgtttgccttgttcaccaaaaaccaacgtcagtggcgtgccgcaccgctcacgacgcaaaccatcgatgaattcaaagccgcctgtgaaaaatatcactacacaagcgcgcaaattcttccccacgacagttatctgattaacctcggacatccggtcactgaagctctggaaaaaagccgcgatgcctttatagatgaaatgcagcgttgcgaacagctggggctttctttgctcaacttccaccctggcagccatctgatgcagattagtgaagaggattgccttgcgcgtattgccgaatccatcaacattgcgctggataaaactcaaggtgtgacagcggtgatagaaaacaccgccggtcagggcagtaacttagggtttaaattcgaacatctcgcggcgattatcgacggcgtggaagataaatcccgcgtcggcgtctgcattgatacctgccatgctttcgctgccgggtatgatttgcgtactccagccgaatgcgagaaaacattcgcggattttgcccgtactgtcggctttaagtatctgcgcgggatgcaccttaacgatgcgaaaagcacctttggcagccgcgttgaccgccatcatagcctcggtgaaggcaatatcggtcatgatgcgttccgctggatcatgcaggacgaccgtttcgacggcattccgctgatcctcgaaaccatcaacccggatatctgggcagaagagatcgcctggctgaaagcgcaacaaactgaaaaagcggtagcctgaagatgaataaccgggaaaaggagatccttgcaattttacggcgtaacccgctgattcagcagaacgaaattgcggacatgctgcaaatcagccgtagccgcgttgcggcgcatattatggatttaatgcgcaaaggccggattaaaggcaaaggttacattctcaccgagcaggaatactgcgtagtggtggggacaatcaatatggatattcgcgggatggcggatatccgttacccgcaaagcgcttctcatcccggtacaattcattgcagtgcgggcggcgtgggacgcaacatcgcccacaatctggcgctgttaggccgtgacgtccatttgcttagtgtgattggcgatgacttttatggcgaaatgctcctggaagaaacgcgccgtgccggcgtgaatgtctccggctgcgttcgtttgcatggtcaaagcacaagcacgtatctggcaattgccaatcgagacgatcaaaccgtgctggcgattaacgatacccatctgctggaacagttgacaccgcaactactgaacgggagccgcgatttacttcgtcatgcgggcgtggtactggctgattgcaacctgacagccgaggcgctggaatgggtctttaccctcgctgatgaaatcccggtgtttgtcgataccgttagtgaattcaaagcgggcaaaatcaaacactggctggcgcatattcacaccctgaaacccactttaccggagctggaaattttatggggacaggcgatcaccagcgatgctgaccgtaataccgcagtgaatgcattgcatcagcaaggtgttcagcaactgtttgtttatttgcccgatgagagtgtttattgcagcgaaaaggatggagaacaatttttgctgaccgcgccagcgcatacgacagtagacagttttggtgctgacgatggttttatggcgggcctggtatatagctttcttgaaggatacagtttccgcgacagcgcccgttttgcggtagcctgcgcggcaattagccgcgccagcggcagcttaaacaaccctaccctgtctgccgataacgcgcttagtttagtgccaatggtgtaacaatgttgccggatgcgacgcttaacgcgtcttatccggcctacaaatcaggcaatttcagcaagtaaatgtaggcctgataagcttgcgcatcaggcaatgacactcaagctaaaccaataaagaacccggcaatggtcgcactcatcaagttggaaagcgtcgccgccgccagcgcccgtaaaccaagctgggcgatttccggcgcacggtgtggcgcaaccgcagaaaacgcccccaccaccaccccgatagaaccaaagttagcgaaaccgcacaacgcgaaggaaataatcgccacagttttagcatcgagagtgccagccgtttgcagatagggactgaaattgagataagcgacaaattcatttattgccagtttctgtccaatcaaactcccggcaagattcgcatcactccagtccacacccatcacccacgccagtggagccagcaggtaacctaaaatggactccaggctggcatgttcaaaaccaaaccagccaccaacgccgccgataataccgttaatcaacgcaattattgcaacaaatgccatcaccactgttgccacacctgcggcgattttcagcccggtcattgcccctgtcgcagcggcttcaataatgctttttggcggtgtttcggtgaaagagaggttattaaaggaaacctggctagattccgttgccgggcttaacaggcgggcaaacaagatcccgccagggatcgccattaaacttgccgccagcagatattccacaggcacgcccagtgcggcgtaaccaatcattgtgctaccagcaatgctggccatgccactacaaatcgctgtaaataattcattgcgattcagacgatcgataaagggtttgacgattgccggaatttcgttttgcccgaggaaaatggtggtgaccgcgacgaaactctcgatcttgctgatatttaatgctttctggaagataccgccgagaattcgaattaaaatccccatcacaccgatgtagtagagaatactcaccagcgcggtgacgaagataattgccggtaacaccctgaaaccaaagataaatcctgcaccatcaaataaggtatccattttcggtccgaccagagaaccgaagataaatgcgctacccgcgtcgctgtacgccatcactttatgcacgccaaaagcgactttttcagcgacccaacgccctggcggtaaccaaagcataatgccgccaatcacgacctgtaacactaacgccgcgccaacggtacgcaggctgatcttcttcttgtttacactcagtaaaaacgcaatcgtcagcaataccaccattcccagaacacttctcatgacatccatagtgattatctcttcatgtcatattgggcgacggctttctgcccatcagaaatagccaggcctgcatcttgcgataccggcccggcttgttatcaacacttaatgggttttgatgtagccgcgcacgcactcttcgactaatccccagaaccagtctgtatcaatagtgatgccgactttggtattggcgggcttgccaagaacgcccagctcgtcgcagacggtacgcccatagcaagggccactgttgacgtccacttcgacgtacatctcctgggttttaatgccatcagggttaatcagataaccgatgcaggtggcgtcgtgcaccgggccgccagcaaggccgtagttttcgaactgcgttttgagagtgaagttcatgatgtcgctgaacagctctccggcggggccgcctgccctttccatccgagcaatcacgtccggggtgcaaacggtctggttggtgagatcgaggcccatcatcactaatggaacgccggaggtgaacactacgcgtgcggcttccgggtcggcaaagatgttgaactcggcagatggcgtgaagttgcctgtaccgtaagcgccgcccattagcacaatttcacggattttgggcaggatcgcgggttgcatacgcattgccaccgcgatattactaagcggaccaaccggcaccagagtgatatcgccatcgcttgccatcagggtatcaatgatatatttcaccgcatgagtgctttctgcctggcgggtcagcggctcgaataccgggccatccagtccggtttcaccgtgaatattatcggcaacgatttgttgacgcataatgggctgcggcatccccgcataaaccggaacattaatctccagtttctggcaaacattcaggccattaattaatgttttatcaagcgtctgattacccgctacaatagtgatgcctaataaatctattgccggatgtttcgccgccatcattatagcaatagcatcatcatgacccggatcacaatccagaataatttttctcttttccattgtttatttcctctgtttccagttgcgttattttttctacagcaaagaaaattcgaccgggccgatgattgaatcttaacaacagcgtacgtatgctaaatatgagaaatctcatagcggataaacatcgtgaaagaaatccacaataatgatcttaagcagcaattgatgagtgaatccgcgtttaaggattgctttttaacggatgttagtgccgatacgcggctgtttcattttttagcgcgtgactacattgtgcaggaagggcaacagccgtcctggctgttttacctgacgcgaggccgcgccaggctttacgccacgctagctaatggtcgcgtgagcctgatcgatttctttgccgccccctgttttattggcgagattgagttaatcgataaagaccatgaaccgcgtgcggtgcaggctattgaagagtgttggtgccttgcgctccctatgaaacattaccgtccgctgttattaaacgacacgctatttttacgaaaactctgcgtcaccttaagtcataaaaattatcgtaatattgtttctttaactcagaatcaaagttttccgttagtgaatcgcctggcagcatttatattactcagccaggaaggtgatctttatcacgaaaagcatacgcaagcggcagagtatttaggcgtttcttatcgacatcttttatatgttctcgcgcagttcattcacgacggtttattaattaaaagcaagaaagggtatctcattaaaaacagaaagcagttgagtggactggcgctggagatggacccggagaataaattctccgggatgatgcagtaaaaattattttcaatagcgcgattgccggatgcaacgcttaatacgttttatccggtctacaaatcgagcattacgccagaccaataaagaacccggcaatagtcgcactcatcaggttggaaagcgttgctgctgccagcgcccgtaaaccaagctgggcgatttccggcgcgcgttttgggctaatagcgctaaatgcgccaacgacaacaccgatagaaccaaagttagcaaaaccacaaagcgcaaaggagataatcgcaatggttttcacttccagcgtgccgcccgtttgcaggtatggggagaaactcaggtaagcgacgaattcgttaatcgccagtttctgcccaatcaggctacccgcaagattggcatcactccagtccacacccatgatccacgccagcggtgccagcacatagccaaaaatactttccagagaggcattggcgaaaccaaaccagccgccaattccgccgataatgccgttgatcagcgcaataattgcgacaaacgccattaccaccgtcgccacaccagcggcgatttttagcccggtcatcgcaccgctcgccgccgcttcgataaagctttttggcggcgtttcgctgaagctcagattttcaaatgtgacctggctaggctcggttgccgggctaagaatacgtgcaaacaaaatcccgccagggatcgccatcaggcttgccgctaacaggtagtcaattggtacgcccattccggcataaccaatcatcatgctaccagcaatggacgccatcccgctacaaattgcggtaaacaactcgttgcgattcatgcgatcgataaacggtttaacgatcgccgggatctcattttgcccgaggaaaatagtagtaaccgcaacaaaagattcgattttgctgatgttgagggctttctggaaaatgctgccaaggatgcgaatcagcagccccatcacgccaatgtagtacagcagactgatgagcgcagtaacgaaaataatcgccggaagtacgcgaaaggcgaagataaaacccgcaccgtcaaacaggacatccattttcggcccaaccaggctaccaaaaatgaaggcgctaccggcatcactgtaagacatcactttatgaacgcctaatgccgcctgttctactgcccattttcccggtgggaagtagagcatgatgccaccaatagcgatttgcagcagcagtgcggctccaaccgtgcgcaaactgatgctctttttattcacactcaacagaaatgctattgccagtaacaccaccatccccacaacacttctcattatatccataatgattttcccttcatgccggtaaacccggcgtcagcgccaggttttggtatgcttgatgagtacgggcgacggctttctgcccgtcagaaattaacccgcgagacgctgatattctttggcaatttcgctcgccagaatggcgttgttgaacaccagctggatgttggatttcaggctgtcaccgccggtcagttcagcaacgcgcgccagcaggaatggcgtactttctttaccaatgactccctgagcttcagcttcagctaccgcctgatcgatcgccgcattgatagtgtgttccggcatagcaaactgttccgggatcgggttcgctaccacgaggccaccgttcagaccgctttgccatttcaccaccattgcacgggcaatttcgctggcgctgtcgagacgaatgctgacgtcaaacgggctggtgcggcagaaaaacgcaggcagcgctttagtctgatagccaattaacggcacaccgaaggtttctaaatactcagtggttaatcctaaatcgagaatagatttcgccccggcacaaacaacggtgacattagtatttgccagttcttgcaaatcggcagaaatatcgaaggtatgttccgccccgcgatgcacaccaccaattcccccggtggcaaatactttaattccggcaagcgccgcaataatcatcgtactagccacagtggttgcgccattttttccggcggcaacaacaaaaggtaaatcgcgacgactaactttggtcacgttatgcccttcacgacccagtaattcaatttcttctttgcttaaccccactttcatcacgccgccaataatggcgatcgtggcaggtacagcgccctgtttacgaatagtttcttcaacttcaattgcggtctgggcattttgtgggaacggcatcccgtgagaaataatggtgctttccagcgccacaaccggttttttgttttttaaagcgtcctgcacttccggggaaatttgtaataattcaggggaaatttttaattcagacattctgcgttctccactaagcttataacgttggcaatgcttaaatcggggttattggtgtattcacaggagagcgccatactgctacatccctgtgcgaaacgaacagattcggcaaacggcattccgtctacccaacagctagcaagtcccgccatcatggcatcgcccgctccggtaacattaataacattggttttgatcggcgcagaccagccactttcaccgctgatatcgctgtaataaacgccgtcgccgcccatgctcaataccagtcggttcaggccatgttgatggaaccaggcagcaacttttgccacatcttcacgcccactcagcgcaatcccactcagggtttccgcttcaaggcggtttggcttgagagtgtggatctgatttagacggtcgcgcactttgacacatttccatgcgctaaccggatcgacaaatacgggtacgttggcggcattatccagaatccatgccagtgcctcttcactgatattacagtccgcgacaatgacctttgccctctgaataaattcaccgtgctgtgcgagatattcagctgtaatagcgttgctaatattcatgtcatttatagcaaccagcatttcaccggtattatcgagtaaacttaaataactgctcgtattttctcccggcacaatcaggcatttatcgacataaacgccagattgattggtttgcgttagcaggctttgaccataaaaatcactgcctacggcgctcagtagccaggctttgttacccagcaacgccaggttttgtgcaatattgcgccctactccaccaggcgtaaattttattttacctggattactatccgcataatttaaactttcatgactatatccggcgacatcaatattcgcgctacctataattacgacataatccttttcgcgcatagcacgtcctctggtaaaaaattaccaaccctgtcaatccacaagaatatagatactgcaaagacggtttaaacatgtgttcatatttaaacatgtgctcatagtatgcatgttttacgtaaagtaaattaccgccagagaggcaaaatgggcagatttgagcaggctcacaaaatgcgattaaatgcctgaattacaaaagcgaggaatttgtgacgggatgcacagaacagaacaataaaaaagggcagaaaataatctgcccttgaggaaataacctgagtgtttgatgaacgtttgaagtttctactgaaagataaaaccatttaaattcataaaattacattcacaaaccggtcattctctttgcgctcatcaaatgttacaggacaggaaatttctgccctgtaacacaccttttattacgctgctttcgctactgcgtccacttccggacgtttcaggaaggcataggccaaacccgccaccagcgtaccggcaataattgctaccaggtaacccaataccggcgtaatagcgccagggatcagcagaacaaacagaccaccgtgcggtgccatcagtttcgcaccaatcgccatactgattgcgccagtcagcgccccacccacgatacagcacggcagcacacgcatcggatcacgagcagcaaacggaattgcaccttcgctaatgaagcacagtcccaataccagagcggctttgccaccttcctgctgcgctttgtcgaatttgcgacgcgccaccattgttgccagacccattgccagcggtggcaccatacctgccgccataatcgccgccatcgggccataggtttgagtactcagcagacccacaccgaatgcgtacgctgctttgtttaccggaccgcccatgtcagtacacatcatgccaccgaggatcgcccccagcagaaccgcattcgcagtccccatggtctgcagccagtgagtcagcccttcgagaatgccagcaactggtttaccgatcaggtagatcatcgccagaccgaccaccagactggaaattagcggaatgatcaggatcggtttcagcgcctccatactctgtggcagtttcaattgcgtactgattaacttcgcaatgtaaccagccaggaagcccgcaataataccaccaatgaagccagaaccggtgctgaccgccagcataccgccaatcagacccggagtgaggcccggacgatcggcaatggaaaaggcaatataacctgccagtaccggcaccatcagcgcaaaggcactaccaccaccaatctgcatcagcgccgcagccaacgtacccggctctttaaacgcttcgataccaaaagcaaaagaaagcgcgatacacagaccacctgcaacgaccatcggcagcatgtaagaaacgcccgtcagcaagtgacggtatgcgcctgcactctctttcttactttcagtggtcgccgtttgagctttgcccgccggttcatacggcgttgcttcagcaaccgctttatccagttcctgcgcggttttcttcagcgccagaccggtagaggtacgatacatcggtttaccagcaaatttcgccagatccacttcgatatctgccgccacaatcaccagatccgctgctgcgacttcttcgggagtgattgcattacccgcgccaacagaaccacgggtttcaactttcacccaccagccacgttttttcgcttcggtttcaatggcttcagccgccataaaggtgtgtgctacgccagtcgggcaagcagtcaccgcaactacgcgtttcggaccgctggcggcaactggtgctgtcgcagcgaccggcgcagtgtaaggtttcgcatggcctttggcttcactcaggaacagctcagggtgcgcaactgcccgggaaatatcgcccagccagacatttttaccgttcagcgcgctgtcgttcgggatggaatcaccgagaacaatcgccatttcagcgtcgttcggattgtcgatgatttccagttttgcttttcgcgccgccgcgcccagcagggtcttcgccatataggcgcgtgcctgaccgagattagcgtcaataatcagcagcgttttcattatgcctctcctgctgtcagttaaaaggttgtaagtcgacgcgcgccatcattgcggccaactgcggacgatcggtaatacccacattgctttgacttaccgccagggctgcaacagctgtcgccagacgcagtgtgtgttcactggattcacgcatcagcaagccataaatcaggccaccaaccatagaatcccctgcgccaacggtgcttacgacatcgacactcggtggtttggcgatccattcgccggaggcattaacccaaagcgcgccttcggcacccagactaataacaacatgcgcgatgccttgttcacgtagcgcatgtgcagcttcaatcacatctttcatttcaggcagtttacggcctgcccagatttccagctcgcggcggttaggtttcaccagccacggtgccgctttcaaacctgctactaacgcttcacggctactatcaaagataatgcaaggacactgactacgcaggcgagtcatccagtcggtgaacgcttccgggctgacgccactcggtaagcttccgctgacacagaccatatcgaactgaccgagccagctcagagaatcagtcacaaagcgttcccagtcggcgggggtgacttcaaaaccgctgaagttgaagtcggtcacttcgccgtctttttccgtcagcttaacgttaattcgggtgcgcccctgtacaacctggaaacggttggcaatgcccagctcgctgaacagttgctgaaaaccatcctgattgtctttacccaggaagccgccaacggtgacatcaattcccaggtcttttaatactttggccacgttgatgcctttacccgccgcatgcagaccggtggttttcaccaggttcacttcgccgcgttcaatttccgggcagaaaccaacaaggtcataagccggattaagggtgatagtagcaacacgtctgctcattatgcgccctccccaagaccagcagcgatagcgtcgccgattgctttcagcgcctgttcagcatctgcaccctgggcggtaaagcgtaggcgatgacctttcttaacgccaagtgccacaactttcatcagactacgtccgtttgccggtttgccggtaccatcaaggtttgtcacggtaatatcactgttaaattgtttaatggtattgaccagcatggtacctggacgagcatgcaggccgtgttcattgcgcaccacaaactccgcgcttaacacgtcgtcggtcggcgcatcatcgctggtcagcagcgccagcaacgttgccgcatccgctttcagcaagcggtcagctttattgtcgagcaataaatcagcgagacgcttaagaaccgcgatgggctgatcgtcattcatcgccacactcaccagcatggctgccgtttcgccgtccacatcaaaagcatttgccgcacggcttaccgcaatcgcgctacgcagattgccttcggcgctatcgctcagccagataccctgtccgagattcagcggttgttcattgatggctttggtgacgaaagtggcgtcaactgcccccgcctctttcagacgcgcagcgttcagcgcctgaagagtcagcagatcgctggcgacgatatccagtgtcagcatttcgttgtcgagcttcagctgctcactctgcttttcgcccatcagtaatgcgcgaagttcttctgctgttgttgcactcttcagttgttcagcaacggaatcatcgctcagtacgtgggtcagctggcgtagcaggcccagatgttcatcgctgctggcagcaataccgattgccacgtacgctacctgaccgtcaccccaggtgacgccttccgggaactgaaatacctgaacgccggttttcagcacctgatcgcgggtgtcggtagtgccgtgtggaatagcaataccattgccgaggaacgtactggtttgctgttcgcgcgccagcatgccattgacgtagccttctgctacattaccggcctgcaccagcgccgcagcgacctggcgaatcgcctcttctttgtctccggccttttcgcccggatggatgtcctgtacggataactggaacatagttctcctctcttgctgaattgaaacgattcagcctctatgagaaaaaaagcgccaacctggcttagggttaaagacaagatcgcgctgaaacgtttcaagaaagcataatacttctgtttcagcacgcaaggaaagccgtaaagttatgagcaaaagtttgatgtgctgcacaattttttgccatttttcctaattgctgatgggaaaatccgttatcagcaatttcatttcagcagcgtcagcagccaatcagcaacagtgaaatggcattttgactattcgtggcgcttttgatttcgctgtctgtttattttctgacaagcagcgtaaactccgcgtcttcctcttccagtgatcgaccagcatgcataactcccccgcagtctccagcgcgaaaagctttgacctgaccagcacggcgtttttaatcgttgcctttctcaccggtattgcgggcgctctgcaaaccccgacactcagtatttttcttaccgatgaagtacatgcccgtccggcgatggtgggattcttctttaccggcagcgctgtcattgggattctggtaagtcagtttctcgccgggcgctctgataagcgcggcgatcgcaaaagcctgattgtcttttgctgcctgttaggcgtgctggcctgcaccctttttgcctggaatcgcaactactttgttttgctattcgttggcgtctttcttagcagctttggcagcaccgctaacccgcaaatgtttgcccttgcccgtgaacatgccgacaaaaccggacgtgaggcggtgatgttcagctcttttttacgcgctcaggttagtctggcatgggtcattggcccaccgctggcttatgccttagcgatgggtttcagctttacggtaatgtatctgagcgcagcggtagcgtttattgtttgcggtgtgatggtgtggctgtttttaccgagcatgcgaaaagagcttccgctggcgaccggcacgatcgaagcgccgcgccgtaaccgtcgcgatacgctgctgctgtttgtcatttgtacattgatgtggggcagcaacagcctgtacatcatcaacatgccgctatttattatcaacgaactgcatcttcccgagaaactggccggtgtgatgatggggaccgccgccgggctggaaatcccgacgatgttgattgccggatatttcgccaaacgtctgggtaagcgtttcttaatgcgcgttgctgccgtgggtggcgtctgtttttacgcaggaatgctgatggcgcatagtcctgtcattctgttgggcttgcagctgctaaatgctatttttattggcattctgggcggcatcgggatgctctattttcaggatctgatgcccggtcaggcgggtagtgccaccacgctctataccaacactagccgcgtgggctggatcatcgcaggaagtgtggcgggcatcgtcgccgagatctggaattatcacgctgtgttctggtttgcgatggtgatgattatcgccactctgttttgcttactgcggattaaagatgtttaaggcgcggtcagcatttccagatcgataagccaggtcatggcctgctgacggctgttaccgcacatttcagcgctggcttgtaagcctgcacagactttcggtcgcagtgggctggtgaaaattttacagcgttgctgttcatcaagctgaatgcagggcgtattggcgggcttgccatctggcataccgggaatagggctggaaatactaggggcagtgcaacacgccccgcaacccggacggcattccatacgttgttctcttaaggttaaccaccggattgatgagcgcgcacagtaccaccttttttgcaccagcaaaagtgcgaataccacttgcccgaaaggcccgtcgcgagtactttgtcgcgatatttttgacattttcgactacaggaatttttcgatgccaagagcgaacgaaattaaaaaaggtatggtactgaattacaacggcaaactgctgctggttaaggatattgatattcagagccccactgcccgcggtgccgctacgctgtacaaaatgcgtttttctgatgtccgtaccgggctgaaagtagaagagcgtttcaaaggtgatgatatcgttgacaccgtgacgctgacccgccgttacgttgacttctcctatgtcgatggcaacgaatatgtctttatggataaagaagactataccccgtataccttcaccaaagatcagattgaagaagagttgctgtttatgccagagggcggcatgccggacatgcaggtgctgacctgggacggtcaactgctggcgcttgagctgccgcagaccgttgatctggaaatcgttgaaaccgcaccaggcatcaaaggggcatctgccagcgcccgtaacaaaccggcgacattgagcactggtctggtgattcaggtaccagaatacttaagcccgggcgaaaaaattcgtatccatatcgaagaacgccgttatatggggcgtgctgactaacttcagccgcatgcagaaaagggatagctcaggctgtcccttttttaatttattataccaatcttctattttgcgcttcctgaacaccttacgccctcaattttcactcgttgattgatcgccctcacacttcatcgcattaacaatccagaccaatttcaattgctgtcatataactttacactgtcgttgttaattaatcgttactaagacgtgactcctatgaatacaatcgcctccgttacgctcccgcatcatgtacacgctccacgctatgatcgccagcagttgcaaagtcgtatcgttcattttggctttggagcctttcaccgcgctcatcaggcgttactgaccgatcgtgtgctgaatgcccagggcggcgactgggggatctgtgaaatcagcttgttcagcggtgatcaactgatgagccagctccgcgcacagaaccatttatataccgtgctggagaaaggtgcggacggcaatcaggtgataattgtcggtgccgttcacgaatgccttaatgcaaaactggattccttagcggcaattattgagaaattttgcgagccacaggtggcaattgtttccctgacgattaccgaaaaaggctattgtattgacccggccaccggtgcactcgacaccagtaatccgcggattattcacgatctacaaacccctgaagaacctcactccgcaccgggtattctcgtcgaagcactgaaacgccgccgtgagcgcggccttacaccgtttaccgtgctctcctgcgacaatattcccgacaatggtcatgtggtgaaaaacgcggtgctgggaatggcagaaaaacgtagcccagaactcgccgggtggataaaagagcacgtcagttttccgggaaccatggtcgaccgcattgttccggctgcaaccgacgaaagtctggtggaaatcagccagcatctgggggtgaatgatccctgcgcgattagctgcgaaccgtttatccagtgggtggtggaagataacttcgtcgctgggcgtcctgcctgggaagtcgcaggtgtacaaatggtgaatgatgtcctgccatgggaagagatgaaactgcggatgcttaatggcagccactcttttctcgcttatctgggttacctcagtggattcgcccatatcagtgattgcatgcaggatcgcgcatttcgccatgccgccagaacattaatgctggatgagcaagcgccgacactgcaaattaaagatgtcgatttaacacaatatgcggataagttaattgcacgttttgctaatccggcgctgaaacataagacctggcaaatcgcgatggatggcagccagaaattaccgcaacgcatgctggcaggtattcgcatacatcaggggcgcgaaacggactggagcttgctggcattaggcgttgcaggctggatgcgttacgtcagcggcgttgatgatgccggaaatgccattgatgttcgcgatccgcttagcgataaaattcgcgaacttgttgcgggcagcagcagtgaacaacgcgtaaccgccctgctttccctgcgtgaagttttcggtgatgatctgccagataacccgcattttgtgcaggccatcgaacaagcctggcaacaaatcgtacaattcggcgcacatcaggcgctattaaacaccctcaaaatttaacgatttctgcggttaaagcggatgaagctcaccttcgtccgctctccccttctcttttctgccttttttagccaggattaacgctcagttaacttaccagagtattgcggagccgttgtgaccaggaccaacctcatcaccggttttctcggcagcgggaaaaccacgagcattcttcatctgttagcccataaagatcccaacgaaaaatgggcggtactggttaatgaatttggggaagtcggaattgatggtgctttgctcgccgatagcggcgcattgctgaaagagatccccggcggctgcatgtgctgcgttaatggtttacccatgcaggtagggttgaataccttactgcgtcagggaaaaccagaccgcttgttgatagagccgaccgggctgggccatccgaaacagatcctcgatctgttaaccgcaccagtctatgaaccgtggatagatctgcgcgccaccttgtgcattctcgatccgcgcttgctgctggacgaaaaaagcgccagcaatgaaaacttccgtgaccagctggctgccgcagacatcattgtcgccaataaatccgaccgtacgacgcccgaaagtgagcaagcgctacagcgttggtggcagcaaaatggtggcgatcgacaattaattcacagtgagcatgggaaagttgacggtcatcttctggatttgccgcgtcgcaatttagccgagttgcccgccagcgccgcgcattctcatcagcatgtcgtgaaaaaagggttagcagcgttaagcctgccagagcatcaacgctggcgtcgcagtctgaacagcgggcaaggatatcaggcctgcggctggatattcgacgctgatacggtattcgacaccattggcattctggaatgggcgcgacttgcaccggtggaacgcgtcaaaggcgtgctgcgtattcccgaagggctggtgcgaatcaaccgtcagggcgatgacctgcacattgaaacgcaaaacgttgcgccaccggacagccgtattgagctgatttccagcagcgaagctgactggaatgccttgcagagcgcgctgttgaagcttcgtttagcgactaccgcgtaaggttgcctgcgtttttcagtaagataattagagaaaatatgattaaaaatttgccgcaaatagtgttgttgaatattgtcggcctcgcgctgtttctttcctggtatatccccgttaatcatggattctggttgccgattgatgcggatattttttatttctttaatcagaaactggtcgaaagtaaggcctttttgtggctggttgcattgaccaacaatcgcgccttcgacggttgtagtctgctggcgatgggtatgttgatgctgagtttctggctgaaagaaaacgcccctggcagacgacgtatcgtgattattggtctggtcatgctattaactgcagtggtattaaaccagctgggtcaggcattaattcctgtaaaacgggccagcccaacattgacttttaccgatattaaccgcgtcagcgaactgctctctgttcccacgaaagatgccagtcgagatagctttcccggcgatcacggcatgatgctgcttatttttagcgcattcatgtggcgttatttcggcaaagttgcaggccttatcgcccttattatttttgtggtttttgcatttcccagagtaatgattggcgcacactggtttactgacatcattgtcggtagcatgaccgtgatattgatcggtttgccctgggtgttgctgacgccattaagtgatcgattaatcaccttttttgacaaaagtctaccaggaaaaaacaaacatttccaaaacaaataactcacagtaattaacatcatcagggttatttttatagtgaggataatcctgatgatgcgcaccgtgctttcatctatcgaacgcaaaaatcattctctaagtaaatgaatggattgcatgcgtttcactcaattgtactttaattgaccaaccccgcttattaactttctgtatcactttttcttataaaaaatcatgtaaaaccgctcgccaagaccgcaccaatcgggtaatctcgaactcgttttgcctcggcggtagattatcctcacagcatataattttgtgcgttagtccacagatttggccttaaggaattgtttcaacatgcccaggtaattagtctcgtgtcgcttggcatttttttataacgatatttgtcgttaaggacttcaagggaaaacaaacaacatggtcaaatctcaaccgattttgagatatatcttgcgcgggattcccgcgattgcagtagcggttctgctttctgcatgtagtgcaaataacaccgcaaagaatatgcatcctgagacacgtgcagtgggtagtgaaacaagtagtctgcaagcttctcaggatgaatttgaaaacctggttcgtaatgtcgacgtaaaaagccgaattatggatcagtatgctgactggaaaggcgtacgttatcgtctgggcggcagcactaaaaaaggtatcgattgttctggtttcgtacagcgtacattccgtgagcaatttggcttagaacttccgcgtagcacttacgaacagcaggaaatgggtaaatctgtttcccgcagtaatttgcgtacgggtgatttagttctgttccgtgccggtagtacgggacgccatgtcggtatttatatcggcaacaatcagtttgtccatgcttccaccagcagtggtgttattatttccagcatgaatgaaccgtactggaagaagcgttacaacgaagcacgccgggttctcagccgcagctaataaaccgtttggatgcaatcccttggctatcctgacgagttaactgaaagcactgcttaggcagtgcttttttgttttcattcatcagagaaaatgatgtttccgcgtcttgatccaggctatagtccggtcattgttatcttttaaatgttgtcgtaatttcaggaaattaacggaatcatgttcatacgcgctcccaattttggacgtaagctcctgcttacctgcattgttgcaggcgtaatgattgcgatactggtgagttgccttcagtttttagtggcctggcataagcacgaagtcaaatacgacacactgattaccgacgtacaaaagtatctcgatacctattttgccgacctgaaatccactactgaccggctccagccgctgaccttagatacctgccagcaagctaaccccgaactgaccgcccgcgcagcgtttagcatgaatgtccgaacgtttgtgctggtgaaagataaaaaaacattctgtagttctgcgaccggtgagatggacattccactcaatgaattgattccggcgctcgacattaataaaaacgtcgatatggcgatcttacccggcacgccgatggtgccgaacaaacccgcaatcgtcatctggtatcgcaaccctttgctgaaaaatagcggcgtctttgccgctctgaatctcaacctgacgcctagtctcttttatagtagtcggcaggaagattacgatggcgtcgccctcattattggcaatactgcgctatctaccttttctagtcgtttgatgaacgttaacgaattaaccgacatgccagtccgtgaaactaaaattgcgggcattcctctgaccgttcggctttatgcagatgactggacatggaacgatgtgtggtacgcatttttactgggcggcatgagtggaactgtcgttggcctgctctgctattacctgatgagcgtacgtatgcgccccggcagagaaatcatgaccgccatcaagcgcgaacaattttacgtggcgtatcaaccggtggtggatacacaagctttgcgagtaacgggcctggaagtactgctacgctggcggcatcctgtcgcgggagaaattcccccggatgccttcattaactttgccgaaagccaaaagatgattgtgccgctgactcagcacctgtttgagttaattgcccgcgatgccgcagaattagaaaaagtgctgccggtaggcgtcaaatttggtattaacattgcgccggaccatctgcacagcgaaagctttaaagcagatatccagaaactgctcacttccctgcccgcacaccatttccagattgtgctggaaattaccgagcgcgatatgttgaaagagcaagaagccacacaactcttcgcctggctgcacagcgtcggcgtagaaattgctattgatgacttcggcaccgggcacagcgcgcttatctatcttgagcgttttacgctcgattatctgaaaattgaccgtggatttatcaacgccatcggtacggaaacgatcacttcccccgtacttgacgcggtgctgacgctggcgaaacgcctcaatatgctgacggttgctgaaggggtcgaaacgccggaacaggcgcgatggctaagcgaacgcggcgttaatttcatgcaaggctactggattagccgcccgttaccgctggacgattttgttcgctggctaaagaaaccgtatacgccgcagtggtaaggtgtgcttacgtcccttattattcatagtgaaagcatgccggattgcggctaatgatgagtaaaaggaaatccgttgcagatgattgtgcgcatactgctgctgtttatcgctctgttcacctttggtgtgcaggcgcaggctatcaaggaaagctatgcctttgccgtgctgggcgaaccccggtacgcgtttaatttcaaccattttgattatgtgaaccccgccgcgccaaaaggtgggcagataacgttgagtgccctcggcaccttcgataatttcaaccgctatgcactgcgcggcaacccgggcgcacgcaccgagcagctgtacgacacgctatttacgacttccgatgacgaaccaggcagttattacccgctgattgctgaaagcgcacgctatgctgacgattattcctgggtggaggtcgctattaatccgcgcgcccgttttcatgatggtagccccattactgcccgcgatgtagagtttacttttcaaaaatttatgaccgaaggcgtgccgcaatttcgtctggtctacaaaggcaccaccgtcaaagccattgcaccgttaaccgtgcgcattgagttagctaaacccggcaaagaagatatgctgagtctgtttagcctgccggtatttccagaaaagtactggaaggatcacaaacttagcgacccgctcgccacgcctccgcttgccagtggtccgtaccgcgttacgtcctggaaaatggggcaaaatattgtctattcccgtgtgaaagattactgggcagcaaacttaccggtaaaccgtggacgctggaatttcgacaccattcgctacgattattacctcgatgataatgtcgcctttgaagcgtttaaagcaggtgcctttgatttgcgtatggaaaacgacgccaaaaactgggccacgcgttataccggtaaaaatttcgataaaaaatacatcatcaaagatgagcaaaagaacgaaagtgcccaggatacgcgttggctggcgtttaatatccaacgtccggtattcagcgatcgccgggtccgggaagctatcactctcgcctttgactttgaatggatgaacaaggcgttgttttacaatgcctggagtcgcacgaacagttattttcagaataccgaatacgcggccagaaattaccccgacgccgcggagctggtgcttctggcaccaatgaaaaaagatctaccgagtgaagtcttcacacaaatctaccagccgccggtatccaaaggcgatggctacgatcgtgacaacctgttaaaagccgacaaacttctcaacgaagcgggctgggtgctgaagggtcagcaacgcgttaatgccacaacgggtcagccactcagctttgaattattgcttcccgcaagcagcaatagtcagtgggtattgccgttccagcacagcctgcaacggctgggtatcaacatggacattcgcaaggtggataacagccaaatcactaaccgcatgcgcagtcgcgactatgacatgatgccgcgcgtatggcgggcgatgccgtggcccagttccgatttacagatttcctggagtagcgaatatatcaattccacttataatgcccccggcgtgcaaagcccggttatcgacagcctgatcaaccaaattattgccgcgcagggaaataaagaaaaattactgccgttggggcgagcactggatcgcgtattaacgtggaattattacatgctgccaatgtggtacatggcggaagaccgtctcgcctggtgggataaattctcccagccggccgtgcgccccatctatagcctcggtatcgatacctggtggtatgacgtcaataaagcggccaaactgccgtccgccagcaaacagggagagtaaatgggcgcttacctgattcgccgtctgttgctggtgatcccaacattatgggcgattatcaccatcaactttttcatcgtgcaaattgcgcctggcggtccggtcgaccaggccatcgccgccattgagtttggtaatgccggagtattacccggcgcaggcggtgaaggtgttcgtgccagccatgcgcaaacgggtgtcggcaatatcagcgacagtaattaccgtggcggacgcggattagatccagaagtgatcgctgagatcactcatcgctacggttttgataagccgatccacgaacgttacttcaaaatgctctgggactacatccgctttgattttggcgatagcctgtttcgcagcgccagcgtgctgacgctgattaaagacagtctgccggtttccatcaccctcggattgtggagcacgctgattatctatctggtgagcattccgttaggcattcgcaaagctgtttataatgggagccgctttgacgtctggagtagcgcatttatcatcatcggctacgccattccggcctttttgtttgccatcctgctgattgtcttcttcgcgggcggcagctatttcgacctgttccctctacgcggcctggtttccgctaactttgatagcctgccgtggtatcagaaaatcaccgattatctgtggcatatcacgctgccggtgctggcgacagtgattggtggctttgcggcgctgaccatgctgacaaaaaacagtttccttgatgaagtgcgcaagcaatacgtggtgaccgcgcgtgcgaaaggggtaagtgaaaaaaatattctctggaaacatgtgttccgcaacgccatgctgctggtgattgccggttttccggcgacgtttatcagcatgttttttaccggcagcctgctgattgaggtgatgtttagtctcaatggtctgggcttactgggctacgaagcgaccgtcagccgcgattatcctgtaatgtttggtaccttgtatattttcaccctgattggcctgctgctgaatattgtcagtgatatcagctatacgctggttgatccgcgtattgattttgagggacgttaatgagccgactcagccccgtcaatcaggcccgttgggcgcgttttcgtcataaccgtcgcggctactggagcttatggattttcctcgtcttgtttggtttgagtttgtgttctgaacttatcgccaacgataaaccgttgctggtgcgttatgacggcagttggtatttcccgttattgaaaaactacagcgaaagcgattttggcggcccgctggcaagtcaggctgattatcaggacccgtggctgaaacaacggctggaaaataacggctgggtactgtgggcaccgattcgctttggtgctaccagtatcaactttgctaccaataagcccttcccttctccaccctcccggcaaaactggctgggaacggatgccaacggcggcgatgtgctggcacgcattctctatggcacgcggatcagcgttctgtttggcctgatgctgactctctgttccagcgtgatgggcgtgctggcgggggcgctacaaggctattacggcggtaaagtcgatctctggggacaacgctttattgaagtatggagcgggatgccgacgctgtttttgattattttactttccagcgtcgtacagcctaacttctggtggctgctggcaattactgtcttgtttggctggatgagtctggtcggcgtggtgcgggcggagtttttacgtactcgtaatttcgactacattcgtgcggcacaggcgcttggcgtcagcgatcgcagtatcatcctgcgtcatatgttgcctaatgccatggtcgcgaccctcacctttttaccgtttattttatgtagtagcataaccaccctgaccagcctcgatttcctcggcttcggtctaccgctcggtagtccgagtctcggtgaactgctgttacaagggaaaaataaccttcaggccccgtggcttgggatcaccgccttcttgagcgtggcgatattattgtctttgctgatctttattggtgaagccgtccgcgacgcatttgatcctaataaggcggtgtaacatgacgcaaactctgttagcgattgaaaatttgagcgtgggttttcgccatcagcaaaccgtacgtacagtagtcaatgatgttagtctacagattgaggctggcgaaacgctggcgctggtgggtgagagtggtagtggcaaaagcgttaccgcgctgagtattttacgcctgctcccttccccgccggttgaatatctctccggcgatattcgttttcatggcgaaagcctgcttcacgccagcgatcaaacgttgcgcggtgtacgcggtaataagatcgccatgatttttcaggaaccgatggtgagcttaaatccattgcataccctggaaaaacagctttatgaagtgcttagtctccaccgcgggatgcgtcgggaagcggctcgtggcgaaattcttaactgccttgatcgcgttggtatccgccaggcggcaaaacggctgacagattatccgcatcagctctccggcggcgaacggcagcgggtgatgattgcgatggcgctgttaacgcgaccggaattattaattgccgatgaaccgaccaccgcactggacgtctctgtccaggcgcagattttacagctgttgcgcgaactgcaaggcgagctgaatatgggcatgctgtttattactcataacctcagcattgtcagaaaactggcccaccgcgtggcggtaatgcaaaacggtcgctgtgtcgagcaaaattacgccgctacgctatttgcaagtcccactcatccttacacacaaaagctactcaacagtgaaccgagtggcgatccagtgccgttgccagaacctgccagtacgttgctggatgttgaacagcttcaggttgccttccccattcgcaaagggattttgaagcgcattgtggatcataatgtggtggtgaaaaacatcagttttacgctacgagcgggtgaaacactgggtttagtgggcgagtccggttccgggaaaagtacgacgggactggcgctgctgcgactgattaattctcagggcagcatcatctttgacggtcagccactgcaaaatttaaatcgccgccagctgttacctattcgtcatcgcattcaggtggtatttcaggatccaaactccagcctcaacccacgactcaacgttttgcagattattgaggaaggcttacgggttcaccagccgacgctttctgccgcacaacgcgaacaacaagtgatagccgtgatgcatgaagtgggattagatcctgaaacacgccaccgttatccggcggagttctctggtggtcagcgacaacgtattgcgattgccagggcattaattcttaagcccagcctgatcatacttgatgaaccgacaagtagtctcgacaaaacggtacaggcgcaaatattgacgctattgaaaagtttgcaacaaaagcatcaactggcctatttgtttatcagccacgatttgcacgttgtccgcgcgttatgtcatcaggttatcatactgcgacaaggggaagtagtggaacaaggaccgtgcgcgcgcgtgtttgccacaccgcagcaggagtatacgcgtcagctactggcgttgagctgacgcttaaaaaggattgtagttactaaagggttcggcaattgccacaccaaaatttttcaatcggcatgttgcagcaaactcgtcctggcgatttacaaacaggcacggctcaccttcacactccagcacgctacatggaacttcgatgtcgcttaacgcctggcttagtttatacatcacgctccatgcattatcaccatccgggctaagcaatttaagcgccaccaggctgttgtcaccgcacggtccattttgcggaatcggttcaaccttgctacctgcgaaaccagcagaccagcgatagttctgcggcagtcgatggacgatactgagttgtaaactagtcacttattttccccggaagcacattcacttcacaatttgtttacatcaattttaacacatcatcaacaatccgtctttatacagatcgtaaagattgatgcctcgcctgcgtggcctctatggctctgatttaagtaatatctgcgggcgtggtcacgtttgcggggctatatgtacccgtttctgcgatctaactcaacctttttaactacaatgatgtgactttttacataaattgattttacataaaataaacatatatcgggggaatgatagatttgtggttgacatgcatcaacaaaggaagccttttagcttcctcgttgtgcaatagatcaccgttttttcggccgactggcgtacagacagaagagaatggagctggttgcgcagaatgcaatactccaaatcatcggccatgcagagttaaaggtcgcaagagaaagcaatgcgccaacaattgcccctatgccaaaacggaaggttcctgccaggctagatgccgttcccgccatatggggaaactcatcaagaatgaccgccatcgcattggaactcaccatgctcacgcagcccacaaacgccgcaacgccaaccaccaggctccaaaatcccagccccagcagcgcactgatgaccatccacgctgccataataaattgtatccacaacccgctgcggaacatatttaacgcgccaatgcggcggacgaagcggctgttaaagatggtcatcacgaacagaaaaacaatgtttagcgcaaagtaataaccaaagttttccggcgcgacgtggttaatttcaatataaacaaacggtccggcgcttaagaaactgaacatcccggcaaagctgaaaccactggcaagcatgtagctcaggacacgtttatggcggaacagcgccgcaaagttaccaatagtggtacgaatgtgaaatggctgacgacgctccggtggtaaggtttctttaatcaggaagaaaatcattgcgctagccagaatcgccgctaatgccaggatccagaagatgtaatgccagctcagccacaccagcacccagccgccaactatcggtgccatcagcggtgcaatggttgtcaccagcatgacaaagctcatcatccggctgaactcttctttcgggtaaatatcgcgcatcagggcgttaatgaccacgctggccgcagccgcagccagcccgtggaagaaacgcatcacaatcagctgatcgatggtgtttgccaacgcacacgccaccgcggcggcggcaaacaccagcgtaccgccgagcaccaccggcttacgcccgaagctgtctgccatcggcccgtagattaactgccccaacgcaaagcccagaatataagtactgagggtcatctgcgtactgcccgccggtacgccaaactgcgcactaattaccggtagcgcgggcagatacatatcaatgctcagcggcatcaacatggccagcaggccaaggataaaaacaatagcaaagctgctatgctgtcgggtggtcacaacgggctcctgaaagtcattgaaaagttagacgacgctggcaatttcttcttcagttaacggacgatattcaccgggggctaaatcagcatccagcgtaataccgccaatacgttcacgatgcagctcaaccacgtggttacccacggcggcgaacatgcgtttcacctgatgataacgcccttcgctgatggtcagacgaacctgcgttggggtaatcacttccagcaccgcaggcttagtgagatctttttcgttatgcagctgcacgcctttagcaaattgctctgccgtatcgtcagctacaggactttccagtgtcaccagataggtcttctcgcaatgatggcgcggagaagtaatgcggtggctccactgaccatcatcagtcatcagcaccagaccggtggtatcaatatccaaccgccccgccgcatgcagtttccacgctaccggttcatcaagaaaatagagcaccgttgggtgatcagggtcgtccgtggagcaaacatagccctgaggcttattgagcatgaagtaacgtggaccgtgttgctgcgccagcgggttgccatcgtaagcgacatcatgttcaggaagcagtttgaacgctgcattacggacgatttcgccatcgacggtgacacgattgccgcggatttcacgcccggcaatagcacggctaacgccgagttgctgtgcgataaatttatcaagtcgcatgtgtgtgattttgcctgtaaaaacggaggtcgggcattgacccgaaaatctgaactgttgtctgcccagtatagcggtctaataacatccctcaagggaaaaagatccatggcatactattagcagaataatctacctacgcgagaccatgatttttacacttcgcccatatcagcaagaagccgtggatgccacgctcaaccattttcgtcgtcataaaacccctgccgttatcgtgctgcccaccggcgcaggtaaaagcctggtgatagcggaactggcacggctggctcgtggtcgcgtgctggtgctggcacacgttaaagaactggtggcgcaaaaccatgcaaagtatcaggcgctggggctggaagccgatatttttgccgccgggctaaagcgcaaagagagccacggtaaagtggtatttggcagcgtgcagtctgtcgcccgtaatcttgatgcctttcagggtgaatttagcctgttgattgtcgatgaatgtcaccgtattggtgacgatgaagagagccagtatcagcaaatcctcactcacctgacaaaagtgaatccccacttacgcctgctggggctgactgccacgccttttcgattgggcaaaggctggatctaccagtttcattatcacggcatggtacgcggcgatgagaaagcccttttccgtgactgcatttatgagctgccgctgcgttatatgattaaacacggctatctgacgccgccagaacgactggatatgccagtagtgcaatacgatttcagccgcttgcaggcacagagtaacgggctgttcagcgaagccgatctcaaccgtgagctgaaaaaacaacaacgtattaccccgcacatcatcagccagattatggagtttgctgcaacgcgcaaaggggtgatgatttttgccgcgacggttgaacacgcaaaagagattgtgggattactgcctgccgaagatgcagcactgattactggcgacacccccggcgctgagcgcgatgtgttaattgaaaattttaaagcccagcgttttcgctatctggtcaacgtcgcggtactgaccaccggatttgacgccccgcacgtcgatcttatcgccattctgcgccctaccgaaagtgtgagtctttaccaacaaattgtcgggcgcggtctgcgtctcgctccgggcaagactgattgcttaattcttgattatgcgggtaatcctcacgatctctacgcgccggaagttggtacaccaaaaggcaaaagtgacaacgttccggtacaggttttctgccctgcctgcggttttgccaacaccttttgggggaaaacgaccgccgacgggacattgattgaacactttggtcgtcgctgtcagggatggtttgaagatgacgacggtcatcgcgaacaatgtgacttccgtttccgttttaaaaattgcccgcaatgtaacgcggaaaacgatattgccgcccgccgctgccgcgaatgtgacaccgtactggttgatccggacgatatgttaaaagcggcgctacgactgaaagacgcgctggtattacgctgtagcggcatgtctttgcaacatgggcacgacgagaaaggcgaatggttgaaaatcacctattacgatgaagacggcgcggatgtgagtgagcgtttccgtctgcaaacacctgcccagcgtaccgccttcgagcagctttttatccgcccgcatacgcgcacaccgggcatcccgctgcgctggatcaccgccgccgatatcctcgcccagcaagccttattgcgacacccggattttgtcgtcgcccgcatgaaaggccagtactggcaggtgcgtgaaaaagtgttcgattacgaaggtcgttttcgtctggcgcacgaattacgcggttaatggtagttttgattgatgtataaggcgattgagtatagaatctcgcccgcttttgcatacgcaaagcagatcacttacctgttgctgggtcgcctgtagcaggattaatttaagagagaaagaaatgtttactatcaacgcagaagtacgtaaagagcagggtaagggtgcgagccgccgcctgcgtgccgctaacaagttcccggcaatcatctacggtggcaaagaagcgccgctggctatcgagctggatcacgacaaagtcatgaacatgcaagctaaagctgaattctacagcgaagttctgaccatcgttgttgacggtaaagaaatcaaagttaaagctcaggacgtacagcgtcacccgtacaaaccgaagctgcagcacatcgacttcgttcgcgcttaattgctgaataagttgtaaaaaaccccgctccggcggggttttttgtatctgcagattatgcctgattacggtattgctattttttgcaggccagataaggcgttcacgccgcatctggcattcagaacacaaaaccgattaattgccgccagacgtccggcgctgcaattggtcgcgcaaattcggcggcgtgcctttaatggtcaaggtatcggttgctggatcccagaagatgcgttcacctaacagcatcgcatcaaagttaatagtcaagccaccgccgctaccggcaaacttcgtcaactgacgcagtgtgctacggtctgccgggaagctctcttccagttcgtagcctttttcagccgcaaactccgtgaagctcacttcgcttacgcctgccagctctttgctcaggcttttcagttcgatctcttcgcctgcctgcagctgctcattacagtagctataaacctgctggcgcacgttctgtcgctctgctttatccagttgtgcttcggcagtgaaatcatcaaccgcttgcaacagcccacggttttgcgctttcgcgtttaacccttcgctggccccgaggaaatccataaagaaatccgccactttgcgccctactcgccctttcaggaaagtgagatagcgggtggactctggattggtttcccattcggttaaatcgatacgcgcaacaatatccgcatgattgatatcaagataatgggttgggttgatgtcgagattttcgttaacgcgcatactgctcaggttgctcagaactgccaccagcaaatactccaccgccagatagcgatagtggcaaaacagcacgaatccaccgtcagcaaaaggatatttcgctaattcgtcacgcaggcggccggttgccgcgcggctaaatgccaggaagtcctcttcgccctgacgctgtaagcgcagcgtctgcgccagttcactctcttcgctaaacaagccgtaagctttatttttggcgctatagacccgatgcagttctgccaccatctcaacgacggtttctgtcggttccagcaaactatcgcgcaacaccagctcaaggttctgctcatcacgcttgataagctggtgcagagcaatctggttgatatccagactcatgataaactctcctttaagaccgggcggtattcaaccaccgccggttaagcgacgcaataaaagatggcggtcattttacagaaggcagcgtaacgagaatgatttaacgcataaaaaagcagaaaaaaaaccgttgctacggtaatatgttgccctttcatcaactaactgatttcgatttatgccacaaatttcccgctacagtgatgaacaggttgaacaattgctcgcagagctgctcaacgtactggaaaaacataaggctccgaccgacctttccctgatggtgttaggcaacatggtcactaaccttatcaacaccagcattgccccggcccaacgccaggcaattgccaactcttttgcccgcgccttacagtcctctatcaacgaagacaaagcgcactaagggaaacagataacaggttatggtaactcatcgtcagcgctaccgtgaaaaagtctcccagatggtcagttgggggcactggtttgcactgttcaatattctgcttagcctcgtcattggcagccgttacctgtttatcgccgactggccgacaacgcttgctggtcgcatttattcctacgtaagcattatcggccatttcagcttcctggtgttcgccacctacttgctgatcctcttcccgctgacctttatcgtcggctcccagaggctgatgaggtttttgtccgtcattctggcaacggcgggaatgacgctattactgatcgatagcgaagtctttactcgtttccatctccatcttaatcccatcgtctggcaactggttatcaacccagacgaaaatgagatggcgcgcgactggcagctgatgttcatcagcgtgccggttattttattgcttgaactggtgtttgcgacgtggagctggcaaaagctgcgcagcctgacgcgtcgtcgacgcttcgcgcgcccgctggccgcattcttatttatcgcctttatcgccagccatgtggtgtatatctgggccgatgccaacttctatcgcccgatcaccatgcagcgcgctaacctgccgcttagctacccgatgacggcgcgacgttttcttgagaagcatggtctgcttgatgcgcaggagtatcaacgccgtcttattgagcaaggtaatccagacgccgtttccgttcagtatccgttaagcgaactgcgctatcgcgatatgggcaccgggcagaatgtgctgttgattactgtcgatggcctgaactacagtcgcttcgagaagcagatgcctgcgctggcaggttttgctgagcaaaatattagcttcacgcgccatatgagctccggcaacactacagacaacggcatctttggcctgttctatggcatcagcccgagctatatggacggcattctgagcacccgtacgcctgcggcattaattactgcgcttaatcagcaaggctatcagctggggttattcagtagtgatggctttaccagcccgctgtatcgccaggcattgttgagtgatttcagcatgccgagcgtacgcacccaatccgacgagcagaccgccacgcagtggatcaactggctgggacgctacgcacaagaagataaccgctggttcagctgggtttctttcaatggtactaacattgacgacagcaatcagcaggcatttgcacggaaatatagccgggcggcaggcaatgtcgatgaccagatcaaccgcgtgctcaatgcactgcgtgattctggcaaactggacaatacggtggtgattatcactgccggtcggggtattccactgagcgaagaggaagaaacctttgactggtcccacggtcatctgcaggtgccattagtgattcactggccaggcacgccggcgcagcgtattaatgctctgactgatcataccgatctgatgacgacgctgatgcaacgcctgctacatgtcagcacacctgccagcgaatatagccaaggtcaggatttgttcaaccctcaacgccgtcattactgggttaccgcagcggataacgatacgctggcaattaccaccccgaaaaagacgctggtactgaacaataacggtaaataccgcacttacaacttacgtggtgaaagagtgaaagatgaaaaaccacagttaagtttgttattgcaagtgctgacagacgagaagcgttttatcgctaactgattaattataaatcagttagcgaaatatcttacttgcaatcggtgtggaaaacggtagtattagcagccacgagtcggcacgtagcgcagcctggtagcgcaccgtcatggggtgtcgggggtcggaggttcaaatcctctcgtgccgaccaaaaatcccaagaaaaaaccaacccttacggttggtttttttatatctgcaattaattcgataaacagaccgtgacacatcacagcctgtttattttctgttatcagaacgtcctgagctttcatcctatgaaattaattgctgttaaaagcattgggtacagaaaatacccatagctccatacccggagtcagtttttaaaaactgtttaaagaaatgcacaagtattgtgattgattttttagttgtttttcttgatgagaagctgatgcaaaattccgtctttataatgaaaatgatgccaaagcgaacgacaaggttgtagttttcactacatgtccatacataaaatggggtaacattcacgcgcctggtagcgttaccaacgctacgctcaaacataatgattctaataaaacctcaggagactactatgcctgaagcaacaccttttcaggtgatgattgtggatgatcatccacttatgcgacgcggtgttcgtcagttactggagcttgatcctggctctgaagtggtcgccgaagcgggcgacggcgcgagcgctatcgatctggcgaatagactggatatcgacgtgatcttgctggatctcaatatgaaaggtatgagtggcctggatactctcaatgccttgcgcagggatggcgttaccgcgcaaattattatcctgaccgtatccgatgcctccagcgatgtctttgcgctgatagacgcaggcgcagacggttatctgttgaaagacagcgacccggaagtattgctggaagcgattcgtgccggagcgaaaggcagcaaagtctttagcgaacgcgtcaatcagtacttacgtgaacgtgaaatgtttggcgcggaagaagatcccttcagcgtgctgacggagcgcgagctggatgttctgcacgagctggcacaggggctgagtaataaacagattgccagcgtgttgaatatttccgagcagacagtaaaagtacatattcgcaatctgctgcgtaaactcaatgtccgcagtcgcgtggcggccaccattctgttcctgcaacaacgcggggcacaataaaaatagcccgatggatttatcatcgggctgagatttatgacaaacgcaaaactgcctgatgcgctacgcttatcaggcctacgtggatcgatcaatttattgaatttacacaattttgtaggccggataaggcgttcacgccgcatccggcataaactaagcgcactttgtcaacagtctagcccgatggcatcaccatcgggcctctttttatttactctcctgcgggctcaaatgttgcatcgcctgcgcgatactacgttcaatcaccgcacggcgagtatcgttggcaggtaagagtttcaacatcatctcccacgcggcaacggcttcgccaaatcgctgctgctcaaaggcattaaacgcatacatgcttagcacacggatattgctatggtccgttctcaccagctgacgtagcagttcaccgccgaggcggttgtcgttgggatcagaactacgagtcaacgcttcagcgtatcccagtgcagcatcactgtttttcggatcgaggcgatacgcagtggcgtatgcatcggtggcgatactggcgttacccagcgccatgccaacgcggcccaacataatccagccttctatatctcccggatttttttgcagttgagtacgcatccccagcgcaagacggctcatctcttcttcgttgagcggatcggctttcggatccagcgccctgtccagcaacgccggagcctgtgccgtggcctgctgccagattttcacctgctgataattgccagtctggtagtagctgacgccagccacaattaacgccaccacaatacccggcagataaacaacatatccggcacgcttaccttccggcacgctttgttcaggaaacgcttccggcaccacgcgtacccgacgccggctgcgggcgtatatgacccaaccgccaatgccaatagccactactggcagcacccacagcagcacggtcagcggcgttaacggcggatcgtaagtgacgaagttgccgtaacgcgccaccatataatcgacaatctcttttttacttttaccttcctgcatcagttcatacactttctgacgcaggtcggtggcaatcatgctgttggaatcggcaatgctgttgttctggcatttcgggcagcgcagttcttcagtgagctgacggaactgttgttcctgtgcttcatctttaaactgcaacacatcgatggtcgccagcgcactgccggagatcatcagcatcagcacgcccaataaaaacctcattgtgcggcctccttactgtatttctcccacagcggcttgatctcttcttcccagacgcgaggattcagatcgcccgcatggcgatagcgaatgatgccgttgccgtcaataagaaacgtttctggcgcgccatagacaccgagatccagccctaacatgccatcgccatcaaacaggcttagcgcgtaaggattgcccagctctttcagccagctgattgccttctggcgatcgtctttatagttcatgccgaccacgcggatgccctgcgcagaaagctgattcagatattgatgttccgcacggcaggtcggacaccaggtcgcccagacgttaagcagtactggtttgccctgagtcagcacatccgcctgataaaactgccccggattgtccagactttcgagacgaaacttcggcacaggcttgccaatgagcgcgctttccagattggtcggatcatccccttcggcattacgcgccagctgccacagcagcgccgcggcaatcgccaggaagataatcaacggaattaacaatactttgcgcttcatacggcctccggcgcagttttttgcggactcacgcgcttacgatagcgaggatcaaacagacacagcagtccgcccaacgccatcatcagcccgcccgcccaaatccagcgaacaaatggtttgtagtaaagacgcacggcccacgcgccgttttccagctcttcaccgagggccgcgtacaggtcacgcgtgatgccgccgtcaattgccgcttcggtcatcatgctcccggcagtgttgtaataacgtttttccgcatacagcaccgtttccggcttgccatcgcgcgttacgccgatagtcgccacaccgccacgccagttcgggccagtcacctctttgacatcacggaaggtgaagcgatattcatgaatatcgacgctatcgccggacttcatgcgcacatcacgctcaacgctatagttctggctaaaggcaatgccaacaattgtcactgccagcccaaggtgagccgccaccatcccccaataactgaaggtggttttcgtgccgcgactaatacgtagcgcagcttccgcaattgccagcaccgcaatccagcaggccattgccaggccgagcaccgtcatcgccacaactttgctttcgaacagccacggcaacagcaggctcagcaccagcgtagagatgaaggcgataatcaataaattgcggatcttacgcgggcgatcccgcccccagcgcaccagaggaccgacaccaagcagtagcgcaaacggcaccatcagccaggtaaacatggtgttgaagaacggttcgccaatgctaatactgcccagtcccagttgcttatgcaccaacggcagcagcgtccccagcaacaccaccagcatcgcagcgaccagcaaaacattgttcgctaacagcaaagattcccggctccacagcgcattgtttacgcgactgcgaactttgtgtccacgcgcggcaaacagcagcaggctaccgccaatcaccagcaccataaaggcgaggataaacataccgcgcgccggatcagacgcaaacgcgtgtacgcttaccagcacgccggaacgcacgaggaaagtccccaacagacacaagctgaaggcactgattgccagcagtaatgtccacgctttgaagctggcgcgttgttcagtgaccgccagactgtgcatcagcgcagtccccaccagccacggcataaagctggcgttttctaccggatcccagaaccaccagccaccccagccgagttcgtaataggcccatgcggaaccgagcacgatgccgagcgtcaggaagatccacgctgccagcgtccacggacgagtaaaacgcgcataagtgctgtccagacgcccgctcagcaaagaagcaatggcaaaagcaaacgccacgctgaaacccacgtaccccatataaagcagaggcggatggaagatcagccccggatcctgcaatagcgggttaagatcgcgaccttcaatcgggaagttcggcaacgtgcgagagaacgggttagaggtaaagagaatgaacagcaaaaagccgacactgaccatccccattatcgccagtacacgggccacaatatccagcggaatacgctgactaaaaatcgccaccgcaaaggtccagccgctcatcagcagcacccacagcagtaggctgccttcatgcgcgccccaggtagccgccacgcgataccacaccggaagctgggtattggagttgctggcaacataggtgacggtgaagtcgttgaccacgaaagcattgaccagcaccagaaatgcgccagccacagacataaacagcagccaggcaaacaagcgggaagacgccatcatgcgcgcatctccgcgcgccacgccccatagcggatacacggacagcagcagcgcaattcccagcgccaggcacagcagtccgttaccaatttctggcatcatgatgctgggtccttataaacttacgtcaacttgctgggtccttataaacactcgccgggcgacggtggttagcttccatcgctttctcaacttctggcggcgtatagttttcatcgtgtttcgccagcacttctttcgcgaggatatgattgcctttttccagttcgccctgcaccacaacgccctgcccttcacggaacagatccggcaaaatgccttcgtaagagacatccacactgccttcagcatcgtaaatggtgaaggtcactttcaggctattgggatcgcgctgcacactacccggcatcaccatcccgccaacgcgcagacgctgaccgacttccggcatttgctgagtttcacgcttgccgtagagaatttcccccggcgtataaaagagatcgatattgctgcgcagcgcatatagcaccagaccgatagtcagcgccagccctgccaacacggcacaggcaatccacaagcggtttttacggcgaatattcatgcagcctcctgctgttgcgcagcacgtaaacgcgcctcacgcgcccgctgttgcgccacgccacgcagaattgcgcgatgttgcatcacgctgtgcacgaccaaaaccaccagcggaataacggtcatcaccaccgccagccagacaaaaaaggcgtaaccgcccattgcgaaaaattcattccaggaagcaaatgcaggggtcatttacggcctcttttcagtatcagttcactcacccacggacggcgtttttccatcagcaaaatcaaattacgcatccgcatcagcgtcagcgtggcagacaggagcaggaagccaaaaatgctccagcgcagcgggctacgcatcgccggatcgatactttgctgcatccgcgtacttccctgatgcagggtgttccaccactccacggagtaatgaataatcggcagattcaccacgccaatcagcaccaggatacctgccgcacggcccgccagacggcggtcgtcgaaggcgtgccacagggcaatcacacccacatacaaaaacagcagcaccagttcagaagtcagacgtgcatcccatacccaccaggtgccccacatcggttttccccatgcagagccggtaaccagggcaataaaggtaaacacggcaccaatgggggccatcgccgccaccgccaggttggccattttcatctgccagacaaggccaataaacgctgccactgccatacttgcataaatgcccatgctccagatcgccgcaggcacatgcaggtagataatgcggtagctatttccctgctgataatcagccggagcaaagccgaatccccagatccagccgacggtaagcacgaccacactggcaattgccagccacggtataaaccagccacagatttgatacagccgtggtgggatcgccagttgatgcagtgttttccacatagtttcgataccagactcgaacaaaaatcagtaatccagcgttattgaatgctgattcgtaacgctgccgccgtcgcaaaaggacttaatgtcgcggtgcctgccagcaacgcgcctaaaattgccagatacccgtcaacgggcaaatgcatagaagccgcgtccatcgcggcggtggcaaagatgagtaatgggatagtcagcggtaacaccagtatgctgagcagcacaccaccgcgcttaagtcccactgtcagcgccacgcccggtgcaccgagaaagccaagcgtaggcgttcccagcagcagcgtcagcgccatcacttgccagccataaacatccattcccagtagcattgctaccagtgggctaaggatgagtaacggcagaccggttaccatccagtgcgccatcaccttcgccagcacaacggcgggcaagggtaacggcaacaacatcaattgttcaagactgccgtcctgcaaatcgtcacggaacagtcgttccagcgccagcaaggaactaagcagcgcagcaacccagataatgcccggtgcaatacgcgccagcagttgcggctccggaccgatactgagcggaaaaagggtaattacaatcaggaagaaccacagcgggttggcgatttcggcgctatggcgaaacgctacacgcagctcaagacggaaaatgcgccagaacatcatgcggccctcgtttgcgtcagactaatgcggcgaattttactttcagcaacgttgagcggctggtgggtagtcagaatcacaatccccccctgctccgtatgctgcgccatacgctgggtcagacgatcgacaccgttaacgtcaatcgcggtaaaaggctcgtcgaggatccataacgtggcacgggtcagccacagacgcgctaaagcgacgcggcgttgttgcccggcgctgagctgatttacaggaatatcttcgaatccggcaagcccggcctgcgccagggcttccagacattgtgcggtatcgccatcgcgatgataaaagtgcagattttctaacgccgtcagccgggttttgatccccggctgatggcctatccataacaggttttgatggtagctgtcgcgtacctgatgcaagggctgcccttgccagagaacctcgcctgcgtcagggcgagacaaccccgtcagcaaacggagaagcgttgtcttccccgcgccgttgctaccggtgatttgtacccactctcctgcgttcagcgtaaaactcaagccactaaataaggttcgttcatcccgctcacaaagtaactctctggcttcaagcatacccacgcaataaccctgttaaaaacctggctcgacttcacgcatatcgggcagcttgtgcgctatccctttatggcaatcaatacaggtttgcccatctttcaccgcctggtcatgcatcttcgcggcaacgcttttctgggcggttgtatccatatactcgaagttgtgacagttacggcactcctggctgttattgtccttcatgcgccgccactcattctgtgccatcgtcagacgatgagcttcaaatttctgcggcgtgtcaataacgccaaaaattttaccatacagctctttacttgctttgagcttgcgtatcatcttcggcacaaactcgtgcggaacgtgacaatccggacaggtcgcacggacgccgctacggttgttgtagtgcacggaatccatgtattcctgatacaccgtgttgcgcatttcgtggcagctaatgcagaactcttcggtattggctttttccatcccggtgttaaagccaccccagaagacgatgccgccaacaaaaccgatcaacagcagcgtccccagcgccagacggctgggggtacgccaccatttccacaggcgcttaatcagaccaggcttacggtcagaatttcccataataacctcttatttcccgtaacctttacttggggtaaaggtattccccacgattggcgcggtatcggcctgcggtacgtgacattgcagacagaaataacgacgcggagccacttccgcgcccactttgccgtcgctgtccataaagtgagtaggactgatacgcggcgcgccagtggtgcgatagctttcgacaccgtggcactgcaagcagcgattggtattggtcgttacctgataaccttcaacgctatgcgggatcattggcggctgattcacatagttcagcggcatccgatcctgctcttttggcatccgaatggccccttcctgtgtcccggatacttccgggctctggctaaaatcgacgccattagccgcccaaaccgcgccgcttaccaccagggccagcatcgccgtccattgacacagcgctttcttcaggtcatggcttttcatgatttcgctcccgaactccattatgtcaacttttcgctccgctactccatcgtgtagttattgtaaatacatcctcagaacagacatccacgcagcgaccgcacgtcatgcaatcgcggctggtgacctgcaccgggctttgttcatccagcaccggggcacgtagcacatgcggttccgggcaaacatgaaaacaatccatacagcggttacatttctgccgatcggtggccgcaacggtaatcacacctttgctacccagcacgccatacagcgcgccaaccggacaaatgtgcccgcaccagccgtgttcaacgaccagtagatcaaataaaaacagcgcgagaataagcagcgcgccgctgccgaagcccattaccaggctacgccccatcagagaaacggggttgatccattcccaaatgagcgtgccagttaaggcacttcccaccagaatgaccaccaacagcacgtagcgaatgtggcgagggatcgtcgcagactgattgaggtcaaagcgcctgcgtaaccagttcgctaagtcggtaatcgggttcagcgggcagacccagctgcaaaataatcgctttcccgccagggcgtagagcacggtgataatcaccgcaccggtcaacgccaccgtggcaggcagatgaccactggcaagactttgcagcgtcatcagcggatcggtcagcggaacggtgtcgaataacaggctactgctgtagttgccgtgcaagatccacacaccaaaccatggaccgctcaaaaacatccccagcacgaagaactgacaaaggcgacgtaacaccagccaacggtgactgcgccaccagccttttttctccagcgcctcgcgcccggcgtcacgtttacgatttgccattgttcccctccagccagccgttacttagcttttgccattgttcccctccagccagccgaagcggtaatggtgacctaactcccctttcgccagactcagcggtaacaccttgattgccggttgttccagcacgcatactttttcgcacttaccgcaaccggtacaggcgtcgctgtgaaccgtcggcagaaagcgggcgtgcttaccggtacgcgtgttgcgctccagctccagggtgatggcctcatcaattttcgggcattcgcgataacaaacatcgcagcgcagcccctgaaagttgagacagttttcctggtccaccagtaccgccagccccatccgcgcgtcgtcgatgctttcaatctcacgatccagcgcaccgcttgggcacactttggcgcacggaatgtcctcacacatttcgcaaggaatatcccgtgcgacaaaatatggcgtgcccgcgctcagaccagaggccagcgtcgccagttttaaggtgtcgtaagggcaagcctgaacacactgaccgcaacgcacacaggcactggcaaaggcgttctcgtttatggctccgggcgggcgcaaccgcacgccagatgcgcgtgcggtttgctgttgtaaccccagcgccacacccacggcagccagcccgcctgctgtgcgaacgacatcgcgcagaaagcggcggcgaccattttgaggtttcgcactccgggacataatggcttacaccttctccagtttgaccgcgcacttcttgaagtccgtctctttgctgagcggatcggtcgcatccagcgtcagtttgttaaccaactgtgcggcgtcgaagaacggcatgtacaccaggccctgtggcggacggttacgaccgcgcgtttcaacaatgctgatcacttcgccacggcgagaaaccactttcactttgtcgccacggcgcagatcgcgcgctttcgcatccagcgggtgaataaacaggaccgcttccgggaaggcgcggtgcagttctggtacacggcgagtcatactgccggtgtgccagtgctccagaacgcgtccggtagagagccacaggtcgtactcttcatccggtgcttccgccgccggttcgaatggcagtgcgaagatcaccgctttgccatccggtttaccgtagaacttatagccttcgcccgctttcacgtacgggtcgttaccttcgctgtaacgccactgcgtttctttaccgttcaccaccggccagcgcagaccgcgcgctttgtggtagtcatcgaacggtgccagatcgtgaccgtgaccgcgaccaaaccatgcgtactcttcgaacagccctttttgcagatagaagcccagctcgcgggattcatcgttcagctgatcttccgccagttcggataccgggaatttgctcacttccggtgtggcatacagcacttcgtacagcgttttgccacgcagttccggtttcttcgccagcagatcttccggccatacttcttcagttttgaagcggcgggagaactggactaactgccagagatcgcttttcgcttcgcccggtgcctgtacctgttgacgccagaactgagtacggcgttcggcgttaccgtaagcgccctctttctctacccacattgcggtcggcaggatcaagtcggcggccagcgcactgactgtcggatacggatcggagacgatgatgaagttgcgcggatcgcgccagcccggcatacgctcttcattgatgttcggcccggcctgcatgttgttggtacacatggtccagtaaacattcagtttgccgtctttcagcgcacggtcttgtgccaccgcgtgcagaccgattttcgccggaatggtgccgctcgggatattccacttcttctcgcagatatcacggtgtttctcgttggtcaccaccatgtccgcaggcagacggtgagcaaaggtgcccacttcacgcgcagtaccacacgcagaaggttgcccggtcagggagaacggaccgcaacccggctgggaaattttgccggtcagcaggtgcaggttgtagaccaggttgttagcccacacgccacgagtatgctggttgaagcccatcgtccagtaggagatgactttcttgttcggatcggcatacagctgcgccagttgttctaactggtctttcggcacgccggtcatttcggcagttttttccagcgtatactcggcaacgaaggctttgtaatcttcaaagctcatcggttcggaggcgtcagaacccggattcttcgctgctttttccagcggatgggtcggacgtaaaccgtagccgatgtccgtcgcccctttgcgcaggttaacgtgcttgctgaagaagtcctgatttatcgcattgttttgaatgatatagttggcgatgtagttcaggatcaccaggtcagattgcggcgtaaagatgatgccgttatccgccagctcgaagctacgatgctggtaggtagaaagcaccgccacggtgacgttctggttagagagacgacggttagtgatgcggctccagaggatcgggtgcatttccgccatgtttgcgccccacagcacaaacgcgtcagcctgctcgatgtcgtcatagcagcccatcggctcatccataccaaaggtacgcataaagccaactactgcgctcgccatacagtgacgcgcgttcgggtcgatgttgttgctacggaagcccgctttaaacagcttggacgcggcataaccttcccagatagtccactgaccagaaccgaacataccgatgctttccggccctttttctttcagggcggttttgaatttctcttccatcacatcgaaggcctgatcccaggtgattggggtaaattcgccttctttgtcatatttaccgtttttcatacgcagcagcggctgcgtcaaacggtctttaccgtacatgattttgggcaggaaatagcccttaatgcagttcaggccacggttaaccggtgcgtccgggtcgccctgacaggccaccacacgtccctgctgcgttccgaccagaacgccgcaaccagtaccgcagaaacggcacggcgctttatcccatttgatggcttcctgctgaccaacaacggcgcgggcaacgcccggcacgctgagaccggcagccgccgcagcggccgcaacggcgttagctttcataaagctacgacgactgagtttcatggtgtttcctcaccttgctcttcctgctggtgataaaccaggctcaccgccagcacgccctctacgttgcgtacactctcaatggtttggatcagcgtttcgctgtcttctgcttccaccaccacaatcaactgaccgctcggcgcgtcgctgacagcaacttcacagccgggaaaggcgttcagttgggtgctgatgtcactaattcgttcgcttttggcctgcacgaccaggctgcaaacttgccagttagtgtgcatggagatactccgcagttatggcacttaccggacagctggctgcacatgctccacatccgttgcaaagttggctattaagttgcggctggtagatcccggagagcgtcgggcgaaagataattgccattggctcacagctatcctgacagcggcggcattcaacactctgatacgccaggcacgcgtccccgatggtgaactgcaaatcccaggccctggtgtggcgcggagaaaataggctttcggggcaagcctgcgcgcaggcgtaacagaagctgcactcgttatttttgaaattaacgctcggatagccgcccgcgccgcgttgcagaatgttgttttcacaagcattaatacaggcgtcgcagcgggtgcaatgggtcagaaaatgagattcatcaccggaccagggcggacggataccgttactggctttgcgccagcgaccagtgagtatgccccgacgggatgcatcaatcttcacattgaccttccatcattaacgcgctctgaaaattgagagcgaccaaataaaccgcataattaataagccatttttatagccgctaagatattaaaggatgtgtcaaagatgcataccccgatcggggtaaaacctgtagcaggatcaaaagagtggcgggaagcgtggcaaaaacgggcttttgctcacatttcaaatggttataaatatatttatatagcgattgattcaccagagatatttctgctggtttgctctctcattagaatttaacactaaaagagcaggtaaaattgtctgaatgttctttaagttattcataaagcaaattaataaatctgatgaatatgttaaccttcagcgacatcatcggtgaaaacctataaatgaagaaggaaagcaaaaaaatgaagaccattctacctgcagtattgtttgccgctttcgctaccacttccgcctgggcggcagaaagcgtccagccactggaaaaaatcgcgccttatccacaagctgaaaaagggatgaagcgtcaggtgattcagttaaccccgcaagaagatgaatctaccctgaaagtagaactgttaatcggtcagacgctggaagtcgattgcaatttgcatcgtctcggcgggaagctggaaaacaaaacgctggaaggctggggctatgattattatgtctttgataaagtcagttccccggttagtacgatgatggcctgcccggatggcaagaaagagaagaaatttgtcaccgcgtatctgggcgatgctggaatgctgcgttacaacagcaagctgccgatcgtggtgtatacgccagacaatgtagatgtgaagtaccgcgtctggaaggcggaagagaaaattgacaacgcggtagttcgctaaactgccgtgaagtgcggcaccccgtaggtcagacaaggcggtcacgccgcatccgacatccaacgcccgagccggttgcctgatgcgacgctggcgcgtcttatcaggcctacaccgctgtgaagtgcggcaccccgtaggtcagacaaggcggtcacgccgcatccgacatccaacgcccgagccggttgcctgatgcgacgctggcgcgtcttatcaggcctacaccgctgtgaagtgctccaccccgtaggtcggataaggcggttacgccgcatccgacatctaacgcccaagccggttgcctgatgcgacgctggcgcgtcttatcaggcctacaccgctgtgaagtgctccaccccgtaggttggataaggcggttacgccgcatccgacatccaacgtccgagccggttgcctgatgcgacgctggcgcgtcttatcaggcctacaccgctgtgaagtgctccaccccgtaggtcggataaggcggttacgccgcatccgacatctaacgcccaagccggttgcctgatgcgacgctggcgcgtcttatcaggcctacaccgctgtgaagtgctccaccccgtaggttggataaggcggttacgccgcatccaacatctaacgcccgagccggttgcctgatgcgacgctggcgcgtcttatcagcatacgccacatccggcataccatgccggatgtggcgtatcattacaacgcaatatccgccacttctttttgaacgggttgcggtttcaactgcggtttcggcgtactatctgctgcctgcggcttgtcgtagttcaaccccagcacttcgctggtgtactgcaactcgcgttctgttgccgctacatcaccgttcagcttgcgtccataagacggaacgatcgctttcaacgtagcctgccattgcgggctggaaacacgatcgccaaatactttttccagcagattcaacataatcggcgcggcggtactcgcccctgggcttgcccccaggagcgcggcaatggttccttgctggtcactgacgacttcagtacccagacgcagtacgccacctttctcggcatcacgcttgataatctgcacgcgctgccccgcttgccacaaacgccagtcctcttttttcgcctgcggatagtactctttcaacgcttcaaaacgatcctcttcactcaacatcacctgactcaccagatatttcaccagatcgaaattatccagcccgacgtgcatcatcggcatcacgttagaggtggtggtggaactcattagatcccacaaactaccgtttttgaggaatttggtactgaaggtggcaaatggcccaaacagcactacgcgtttaccgtccagaacgcgggtatcgatatgcggaacgctcatcggtggtgcgccaacggatgctttaccgtaaaccttcgccagatggtgattaaccacgtccgggttttcgctaacaaggaactgtccgcccaccgggaaaccggcgtagtctttcgcttccggaatcccgctttcctgtaacagcttcagcgccgcaccgcccgcgccgataaagacaaatttggcacgaatgttctgtgcagtgccatttttcagatcggcaacggtaacggtccaggtgttatcgtcattacgctttagggcgcggacttcgctgctgagttgcaggctgaagttagatttcttctgcaaggaagcaattaactggcgggtgatctcgccgtagttcacatcggtaccaatttccgtacgcgtggctgccactttctgttgcggatcgcgcccttccatcactaacggtgcccactctttgatctgcgcgtgatcttcagagtaacgcataccgcgaaacaggctgctttgttgcaacgcggcgtaacgggcgcgcaggaaattgacgttatcctcgccccagacaaagctcatatgcggaacggtattgataaaactacgcggagtacgcagcacgccgcgctcaacctggtgcgcccagaactggcgggaaatctgaaatgcttcgttaatggcgactgctttttcaatactgatgctgccatcggcgttttgcggggtgtagttcagttccatcagtgcagaatgcccggttccggcgttattccagccgttgctactctcctgcgcgacaccctccaggcgctccaccatggtcatgctccattcaggctccagctcgcgtaaataggtccccaacgtggcgctcataatgccgccgccaatcaacagtacatcagtttcctgctcctcggacgctttcgcttttgccgccatgctaacggcattaagccccacggccatgctgaagagcatggcagtcacttttttcatcttgttaatgccttacttttagtcgctttattgcaggtgagatttgcgcggcatcaacggtaacacttaagtaacaacatttaaataatgtttataaattatattctaattttagaaacattataatttcgttgattaattatagggttattagaaatgaagggatttttagcatattgacctgacggcagcagtccgccaggtcagcgtcgtaatattatgccgtccgggcaacggcatcacggctagcggcatcgcgctcttcgcccgtcagctcgctaagttgcccattgcgcatttccagcaggcggtcggcgtggataaagtaatgatcatcatgactgatagcgaaaatagttttacccatctcctgcatcagcggcagcaacacctgataaaactcacgacggaagtgtggatcctgatccgccgcccattcatccagcaggataatatcgcgttcttctgccagcgccagcaacagcgccacgcgttttttctgccctttacttaacttcaggttaacaatacgcccgttgcttaactcaagcttatgagccattttcagctgcgccagccacttctcaaccagttgcgggttagcgggtttaccctccggccccagcagttgatcaaacagccagacatcggtaaacactgcgctaaacagtttgcgataatcttccggttgttcgccgctgacaggtttgccatccagcaagatttcgccgctttgtggctgatacaagcccgtcaacaacatcgccagcgtgctttttccgctaccgttgccgccaatcagaaacagcagctcgccacgtttgatggtgagattaatcggaccaacggaaaacgcgttatcctgataagcaaacgtcacgttacgcagctccagcgtttgccagttgggaaacgcctgcgggcgcggaaactctgctttgaaaggcgcgagcgcgaatttgttcagcttgttaaacgccacctgcgccgtcagcagcgtcggcaatgcgccaaccgcgctaagcagcggcgtacgcaggaataaaagcgtcaagctataggtcgcggcaacgttggtatcagcccaaccgaggctgttcgccatccagaacaccaggccgattgcgcccagcatcatgatgttactccagttcacggcactaagatggaaggtgtctgcgcgaataatatggtggcgatactcttgcgcatcaggaatgtagaggttgttaaacacatactcggcgcgttcccggttcagagtcagctctttgcgcccttcaagtacagtttgaaaatccgtgtacagcttgtcttcggtttcacgcagggtcgccatatgtttgtacacccgcgccaccagcacaaaaccgccccagatggtgatcgccatccagatagccgttaccagcaacattttgccgctcagcatccacagatacgccgcactaccgatagtgagaatgatcccctgcaccagttccggcagacgcacaaaagcaatggtgatattgcgcacatcgctggttaaccccgccagcaagctggcgctaccgagttgttcaatgcgctcgacgtgagtatccagaatccgcttgataaattcactacgcagtcggtaaacgaagtgatgccccaaagtggtgagcgccagttggcttccgagagtgactgccatcaacagcagcaataatcccagaaactccggcaacaccagcagactggtatccgccgtttcgataaggcgctgattgataaaagcaattaagccaatgcctaatgccgcactggcgaggcttagcgccatcacactgataaatggccagcgatactgccgccagacaagtacaagaagttccatgcagaaaacccggacaatgaattacagcccgcagtttaaacatcttcgcgcgcacagcaataataattcttatttttattcttttttacctgcctgacggaatgtcaggttgtagcggcagtcgatggtgagtggatgaaaccccgctttcaacggttgaataccgtgataaaacagccggctttcaccgccccataccaccacatcgccatgttccaacaacaaacgtttgagcggatcatttcgtttcaggccgccaaattgaaaaatcgcgggtaagcccagagaaacagaaacaattggcgcgcgcagatccggttcgtctttatcctgatgcaggctcagtttcgcgccaggagcgtagcggttgataagacaagcatctggctggaaatctggatagcccgccgccgtagccgcacgttgacataaattatgaaaactctgtggcatggcgggccacggtttatttgtttgcggatcaatggggctatagagataaccttgccgatgggtcgtccagcccagatgcccacagttggtcatcgccacgctcatggtatatcccccgggggtgaccatctggcgaaacgggctctggctggcaacgtcattaatatcgcggatcagttgctccgcagcgttaaaagcaaaacgccgtaaaattaccgcaccagccgccagtggctcttgccacggttcagcatcggcaaacagatccaacattacctctcctcattttcagcttcgcggcgcagcagttgcgctttacggctcacgccccagcggtaaccggaaagtgtgccatcaccacggaccacccgatgacagggtattatgatagccagcttgttggcggcacaggcgctggcaacggcccgtaccgctttcggtttgccgatggcgttagccagttgctgataactgacggtttcaccgcaaggtatcgtgcgcagtgcctgccagacttgttgctgaaaagcagtgccgcgaatgtccagcggtaacgtcagcggcgtatcgcgttgattgaggctggcgatcacttcacgcacatgttgctgaaacatcagatcggcaggcgcgttgtcggcagcgggaaacatctgctgcaactcgctgattagtgtcgcgtcatcatcgcccagcaatatcgcgcaaatcccccgctcgctttctgccaccaggcaacgacccagctcacaatcagccagcgcgtaacgcaccgccagattttcgccaccgtgacggaattgtttagccgtcatgcccagcgtttcgtcagctttgcgatagtaactgctgctgtcggggaatccggcgttaagaatagacgtcgtcacgctctcccctttcgccaggctttcgcgcaaacggcgagcgcgccaggcctgttgccaggctttaggcgtcattccggtagtcgctttaaacaaccgatgtagatgaaatggactcatcgccacctggtcggctaaggcttccagcgttacaggcgtttcctgttccagcagtcgacacgcgtgggtgattttatccaaccgatgttgctgggcattggctttttctggctgacaacgtttgcaggggcgaaagccagcggcgagtgcctcgctggcatttgcgtagaaggagacgttttcccgcaaagcatgtctggcgcggcaagacggacggcaaaagatgcctgtggtacgcacggcgaaaacgaattcgccgtcggcattcgggtcgcgggctaagacagattgccagcgttgatcgtcagttaagcatgtggcttttttcataatcagctccctggttaaggatagcctttaggctgcccggtcaccatcacgcaaaaaccaacaatcttgcgctttaatttttttcgctgacaaggaagcttttaaactgtggactcatccaggttttaaagctatcgccttctttggtgatcatataaaccgccagcccttcccggcgaacaacctctttagctttctccggcccgagtaccatcaagccagtatcccaggcatcggcttccagcgccgtcggagcaatcaccgtcacggataccagattgtgttcgatgggacgcccggtttgcggatcgataacatgggaaagacgtttgccgtccagttcgtaatagttacggtagctgccagaggtgctaatcccatgaccgttgatatccaccacagcctgaaccgcgttttctttatcggttggtttttgaatcgctacccgccacggcaggccttcaccgttcataccacggctgttcagcgcgccgcccacgctcaccagatagcgggaaatcccttcctgctccatcaagcgtgccaaatgatcggccgcatagccttcgccgacggtggagagatcgacatataaatccggcaggtctttttgcagatattgctgatggctctgattgatgaccgtcaggtgctgtaagccggttttggctttcatcgcatcgatctgttcctggctcggaatttgaaccggctgttgttccgggccaaagccccacagattcaccagcggcccgacggttatatccatcgcgccatcggtcttcgcgccaatgcgcaggctggtggtgacgatatcggccatcgcttcacttaccggccacgggcttaaactttggctgtcgttaaagcgcatcagcgcggaatcttttttataggtgctaagcagctgatcgtcggcgtccagttgggtctgaatcttttctttaagttcggcgctgcgtttggcgtcaatgcccgggatgctggcacgccagaaggtacccatagttttgccttcaagaacggtaacttcagtagcgtgggttttggcgggttgtggtttttgatcgcaaccaacaaagaagagcgcggcagccagcagtgccacgcgggtaaagcttatttccatacgtgattatcctcatgcgaacggtcgcaagagtacaccaaaaaactgagtttgtacgctgaaaacaatgaaaaaagggcccgcaggccctttgttcgatatcaatcgagattagaactggtaaaccagacccagagctacgatgttatcagtgttgatgccagcgtcacgagtgaactggttgtcgtccagcaggttgattttgtagtcaacgtaggtggacatgtttttgttgaagtagtaggtagcaccaacatcaacatatttcaggatatcttcgtcgtcgtagccacgacccaggtttttacctttagactgcaggtaagccagggacggacgcagaccgaagtcgaactggtactgagcaacagcttcgaagttctgtgctttgttcgcccaacccagggaacctacgcgagttgcgttgtaggtctgggtgtactgagcagccaggtagatgttgttagcgtcgtatttcagaccaccagtgtaggtttcagcacggtcgccgttaccgatgtaagcagcggtgttctgagcatcagtacgtttggagctggagatcgcaccaccgataccgaaaccttcgtaatcataagtgatagaaccgccgacgccgtcgccgttttgacgcagtgcgtcacgaccgttgttagttacgccactagtaaagccttcaccagatgggttgccgtttttaccctggtactgaacagcaaagttcaggccgtcaaccagaccgaagaagtcagtgttacggtaggtcgcgaagccgttaccacgctgctgcatgaagttgtcagaaccgtaggtgtcaccaccgaattctggcagtacgtcggtccaggaagttacgtcataaacaacgccgtagttacgaccgtagtcgaaagaacccacatcctggaatttcagacctgcgaatgccacacgggtccaggagttgttttcgttttcagcgctgttgccctggatctgatattcccactggccgtaaccggtcagctggtcagtaacctgagtttcacctttgaagccaagacgcatgtaggtctggtcgccatctacatctttgttgtcagagaaatagtgcaggccgtctactttaccgtacagatctaatttgttgccgtctttgttgtaaacttcagcagcgtttgctgcgcctgctaccagcagagctgggaccaggagggacagtactttaactttcatgttattaaccctctgttatatgcctttatttgcttttttatgccactgcatactgattaaccctcattaatcagtcggcaagtccattctccccaaaaatgcagaataatccaacacgaatatgatactaaaacttttaagatgtttcatttatcgctatagatgtttcaaaatgtaaatgcaagggaactttttaagattattgcggaatggcgaaataagcacctaacatcaagcaataataattcaaggttaaaatcaataacttattcttaagtatttgacagcactgaatgtcaaaacaaaaccttcactcgcaactagaataactcccgctatcatcattaactttatttattaccgtcattcatttctgaatgtctgtttacccctatttcaaccggatgcctcgcattcggttttttttacccttctttacacacttttcattattctgtgctaccacagaaaaactataacgcttgttaactatttcacaaataattaacatccgcataatttccagcaatctttgtttatttgcaattatttttgttgggctttttgtaggttatttgtacagcaaaatggcgcttgtacatctatttcccccaatgcaggatgataaatatcacgggagaatagagaatcatcaatcaggtaagagtctggaatttcacactgtaccctttatactgccctatcacttcgcgaagttttaacaggtcataaacacgaatgcgtcagaaagagacaacggccacgacccgctttagtctcctaccggggagcattacccgcttctttttactgttgatcattgtgttactggtgacgatgggtgtaatggtacaaagcgccgttaacgcctggctgaaagataaaagttaccagattgtcgacattacccatgctatccaaaagcgcgtcgataactggcgttacgtgacctggcagatctacgacaacattgccgcgacgacctccccctcctccggcgaaggtttacaagagacgcgcctgaaacaggatgtctactatctggagaaaccacgccgcaaaacggaagcgttaatctttggctctcacgacaacagtacgcttgagatgactcagcggatgtccacttatctggatacattgtggggcgcagaaaatgtaccgtggagcatgtattacctgaatggtcaggataacagtctggtgctgatcagtaccctaccccttaaagatctcacctccggatttaaagaaagcaccgtcagcgacattgttgatagtcgtcgtgcagagatgttgcaacaggccaacgccctcgatgaacgcgaaagcttttctaacatgcgccgcctggcctggcagaacggtcattactttacattgcgtactacctttaaccagccaggacatctggcaacggtcgtggcttttgatctgccgattaatgatttgatcccaccgggtatgccgctggacagtttccgccttgagccagacgcgacggcaacgggaaacaatgataatgagaaagaagggacggatagcgtcagtatccactttaacagtacgaagattgaaatctccagcgcactcaactctaccgatatgcgcctggtctggcaggttccttatggcaccttattgctggatacgttgcaaaacattctgctgccactgctgctgaacatcggtttgctggcgctggcgttatttggctataccacattccgccatttctccagccgcagtacagaaaacgtccccagcacggcggtcaataacgaattgcgcattttacgggcaatcaatgaagagatagtcagtctgctgccgctcggcctgctggttcacgatcaggaaagcaaccgcactgtcataagtaacaaaattgccgatcatttgctgccgcatttgaatctgcaaaacatcaccaccatggcggaacagcatcaggggattattcaggcgacgatcaataacgagctgtatgagatccgcatgttccgcagccaggtcgcgccgcgcacacaaattttcattattcgcgatcaggatcgcgaagtgctggtaaacaagaaactcaagcaggcgcagcgtctgtatgagaaaaaccagcaggggcggatgatctttatgaaaaacattggcgatgcgctgaaagaacccgcacagtccctggcggagagcgcggctaaactcaacgccccggaaagcaaacaactggcgaatcaggcagatgtgctggtgcggctggttgatgaaatacagttagcgaacatgcttgcggatgatagctggaaaagtgagacggtgctgttctccgtgcaggatttaattgatgaagttgtgcctagtgtgttgcctgccatcaagcgtaaaggtctgcaactgctgattaacaatcatctgaaagcacacgatatgcgccgcggcgatcgcgatgccttacgacgtattttgctgctactgatgcaatatgccgtgaccagtacgcaattgggaaaaatcacccttgaggttgatcaggatgagtcctccgaagaccgcctgacgttccgcattctggacacgggagaaggcgtaagtattcatgaaatggataatttgcacttcccgtttatcaaccagacccaaaacgatcgctatggcaaggcggacccgctggcattctggctgagcgatcaactggcacgtaaactgggcggtcatttaaacatcaaaacgcgggatgggcttggtacacgctactctgtgcatatcaaaatgctcgcagctgacccggaagttgaagaggaagaagagcgtttactggatgatgtctgcgtaatggtggatgttactagcgcagaaattcggaatattgtcactcgccagttagaaaattggggtgcaacctgtatcacacccgatgaaagattaattagtcaagattatgatatctttttaacggataatccgtctaatcttactgcctctggcttgcttttaagcgatgatgagtctggcgtacgggaaattgggcctggtcaattgtgcgtcaacttcaatatgagcaacgctatgcaggaagcggtcttacaattaattgaagtgcaactggcgcaggaagaggtgacagaaagccctctgggcggagatgaaaatgcgcaactccatgccagcggctattatgcgctctttgtagacacagtaccggatgatgttaagaggctgtatactgaagcagcaaccagtgactttgctgcgttagcccaaacggctcatcgtcttaaaggcgtatttgccatgctaaatctggtacccggcaagcagttatgtgaaacgctggaacatctgattcgtgagaaggatgttccaggaatagaaaaatacatcagcgacattgacagttatgtcaagagcttgctgtaacaaggtagcctattacatgaacaatatgaacgtaattattgccgatgaccatccgatagtcttgttcggtattcgcaaaagtcttgagcaaattgagtgggtgaatgttgtcggcgaatttgaagactctacagcactgatcaacaacctgccgaaactggatgcgcatgtgttgattaccgatctctccatgcctggcgataagtacggcgatggcattaccttaatcaagtacatcaagcgccatttcccaagcctgagcatcattgttctgactatgaacaacaacccggcgattcttagtgcggtattggatctggatatcgaagggatcgtgctgaaacaaggtgcaccgaccgatctgccgaaagctctcgccgcgctgcagaaagggaagaaatttaccccggaaagcgtttctcgcctgttggaaaaaatcagtgctggtggttacggtgacaagcgtctcagcccaaaagagagtgaagttctgcgcctgtttgcggaaggcttcctggtgaccgagatcgctaaaaagctgaaccgcagtattaaaaccatcagtagccagaagaaatctgcgatgatgaagctgggtgtcgagaacgatatcgccctgctgaattatctctctagtgtgaccttaagtccggcagataaagactaatcacctgtaggccagataagacgcgttagtgtcttatctggcatttgcaccgattgccggatgcggcgtaaacgccttatccggcctacgattcccattatttcaacaaattacattaaagtaggccagataagacgcgtcagcgtcgcatctggcatttgcactgaatgccggatgcggcgtaaacgccttatccgtcttagctatcccggcttttcctgaccctctcggcatataacgtcagcgtctgttttatcacatccagcgttaccggcttgctcaggcagctgtccataccggactccagacaccgctgcttctcttcagccaacgcattagcagttactccgattaccggcaacgtcagtcccaactgacgaatgcgttgcgtcaagcggtaaccatccatatttggcatgttgacgtcgctaagcacgatatcaatatgattcttgctaagtacattaagcgcatcgacgccatcattcgcggttttacattgatagcccaagcttcccaactgatctgccagcaaacgccggttaatcggatgatcatccacgaccagaatcatcatatcgtcattatcgctgaccgctttgtccgtactcggcagagcgttagcaggatcgtcgctctccatctcgatcaaataaatacgcgccaacaatgccggtagctcatgcggagcagccacactgtgtacccactcccctggcgctttctccagcggaataccaatatggcgacgacagaaggtcactaccgctctgccctgccattttttactcactacctcgtcagtgatcaacacatcttcgggagtcggttcctgcccttcgtatgttgtaacgacgatgccgctgcgctgcaaactggtttccaggaactgacagaggctcgcattgcggaccgccagccagcagcgtttaccactcaacccttccacgccttttttctgcgggtactgagcgccgtacaacggaatacgcacggtaaactggctgcccattcccggttcactatctacgctgatatcgccgtccatcatgctgatcagtttttcacaaatcgccagacccagaccggtcccctggaaattacgctgtacgcccgttccgacctggaagaagggatcaaacaagcgcaccacttctttcgccggtatccccacgccggtatcgcgaacacggatagagagataatcgccatccgcgcgaacatgcaaaactatacagccggtatcggtgaattttatggcgttactcaacaggttggagatgacctgctgtaaacgcatcgggtcgccatttaaggccactggcacatccggttcaataaagcagtacaagcctaactgcttgcgtaccaccagcggtaaatagttggcggtgatgtggttcatcacttcacgcggactaaactcacgcggttcgatcttcaactgttcgctttcaatcttgctgaaatcgagaatatcgctgataattttcaacaacaggctggaagagttgttcattgccgtcaccagccgatcgacgcctttcggtaactctttggtttgcaacagatccaggttaccgataatgccatacagcggcgttcgcagctcatgactgacggtggcaaggaacatgcttttactctggctcgcctgttccgctgcttgtgccatctcctgcaagctctcttccatcttcacgcggctagaaacatccaccagcacacaaatggccacgttttcattacgatagcggctatggacgaagctgatttgcagattggtattgttgctggtcaggacatcaacaaaattgacctgctgcccacagataatttgcgtcagtcgttggcggtcctcatgcgtaagcatattgagataggtatgcgccagttcgttacttaaaatattgacgccatcagcggtacgcaaaatgcagatacccactggcgcggaggcgacaatcttgcgattgaactgctcatgttcttccagtcgcagggcgtcgctttccgccggaatgaaaatacgtcgctcgtacatccgtgcgagagtaaacaatgcagctccggcaagcacattcagcaaaattgcgttaaggatcaacatgcgaatgcgttccagcaccttatcaaccggcacgctatacacgatgcttaggctactgggtggcagatttttcttcagcaccagctcccggaacccttccgtatagccaaaccaggagcgttcctgcatccagcgaggatcgcccttaattttactttctggtccggtaaggctaatcagggtatgaccattttcatcaagaatggtaacccccatcggcaacgtacccggtaagaaaaagttctccatccggatggtctgctcgacacccaaaagcgcctgcaaccggttcgccagataaactggcgtcaacgcgtaaaaatacccgacgccagggcgcggaccttcgctgatccagtagaggttactgccgctatcatcttgtggtgcatttcgatatttattgatgcgttcatgcaaagctttcaacgcggtatcgcgttccactggcatatcacgcagaccgaaattggccatgcagaggttatcgctgccgattaaaaatacccggtttagatcgtaagccgcagaaaaattatcgcgccagtagcgcataaaccacgccaaactctccagagaacctcgccaggtgttactcattgcggaacaatcggagtcggcaaacagcggttcaaacgcaggcacatccgcctgcgtttctcgtccacgcggggaaagcacaccgttttctgcgcttaagcgattttcggcgatgtacttcagctctttcatcacatcagaggtgcgttgaataaagcgctgagcctgatcggaactcagattaaattcctgacgaatttcgctttctcgctgatgtaacgcattaacgatgtaaaaaacggaactaaaagcaatcaacagccagagcactaacgccaatgctctgaacatgtagcggctggctttcagggttgtacgaaaagaagcaaggtatttcaaaggggcgaagctccgcctcaggtgaccgatggagtgtggttaaggtagcggtaaaagcgtgttaccgcaatgttctctcttctctggaatatgatacaccgccgagaaatcatcaccttaacctctgataatcgtcatataccggacaagactagtggatttcagcatgcattatatgaagtggatttatccacgccgcttacgcaatcaaatgatcctgatggcaatcctgatggtcattgtcccaacgcttactattggttatatcgtagaaacggaaggacgtagtgcagtcttatctgaaaaagagaaaaaactttctgccgtggtcaacctgcttaatcaggcactaggcgatcgctatgatctctacatcgacttaccacgtgaggagcgtatccgcgcattaaatgcagaacttgcccccattaccgaaaatatcactcacgccttccctggcatcggtgctggttattacaacaaaatgctggatgcgataatcacctacgcgcctagtgcgctatatcagaataatgtcggcgttaccattgccgcagatcaccctggtcgcgaagtgatgcgtacaaatacccctttagtttatagtggcaggcaggtgcgcggcgatattttgaatagtatgctccccattgagcgtaatggtgaaatcctcggctatatctgggccaatgaattaaccgaagatattcgccgccaggcctggaaaatggatgtgaggattatcattgtgctcaccgctggtttgctgataagcctgctgttgattgtccttttctcccgtcgcctgagcgccaatattgatatcatcaccgatggcctcagcactctggcacaaaatattcccactcgattaccacaattgcccggtgaaatggggcaaatcagtcagagtgttaataacctcgcccaggcactgcgtgaaacgcggacacttaacgatctgattattgaaaacgctgccgatggcgtcattgccattgaccgccagggtgatgtaaccaccatgaacccagcagcagaagttatcactggctatcaacgccatgaactggtagggcagccttactccatgttgttcgacaatactcagttctacagtccagtactggatacgctggaacatggcaccgaacatgtggcgctggagatcagttttccaggtcgtgaccgcaccattgaactcagtgtcactaccagtcgtattcataacacgcacggtgaaatgataggtgctttggtgattttctctgatttaactgcccgcaaagaaacccagcgccgcatggcgcaagcagaacgcctcgccacactgggtgagctgatggctggcgtcgcgcatgaagtacgtaatccgttaacggctattcgtggttatgtacagatcttgcgccaacaaaccagtgacccaatacatcaggaatatctgtccgtagtactcaaagaaatcgatagtattaacaaagttattcagcaattgctcgaatttagtcgtccacgccacagtcaatggcaacaagtcagcctcaatgcattggttgaagaaactctggtactggtacaaaccgccggcgtacaagcgcgggtcgacttcataagcgaactggataatgaattaagcccgattaacgccgatcgtgaactgctcaaacaggtactactgaatatcctgatcaatgccgtccaggctatcagcgcacgagggaaaattcgcattcaaacctggcaatacagcgacagtcaacaggccattagcatagaggacaacggctgtggcattgatctcagcctgcaaaaaaagatcttcgatccctttttcaccaccaaagccagtggaaccgggcttggtctggcgttaagtcaacgcatcattaatgcccatcagggtgatattcgcgtcgccagtttgccgggctacggcgcaaccttcacgcttattttaccgatcaacccgcagggaaatcagactgtatgactgctattaatcgcatccttattgtggatgatgaagataatgttcgccgtatgctgagcaccgcttttgcactacaaggattcgaaacacattgtgcgaacaacggacgcacagcattacacctgtttgccgatattcaccctgatgtggtgttgatggatatccgcatgccagagatggacggcatcaaggcactaaaggagatgcgcagccatgagacccggacacccgttattctgatgacggcctatgcggaagtggaaaccgccgtcgaagcgctacgctgcggagccttcgactatgttattaaaccgtttgatctcgatgagttgaatttaatcgttcagcgcgctttacaactccagagtatgaaaaaagagatccgtcatctgcaccaggcactgagcaccagctggcaatgggggcacattctcaccaacagcccggcgatgatggacatctgcaaagacaccgccaaaattgccctttctcaggccagcgtcttgattagcggtgaaagcggcaccgggaaagagttgattgccagagcgattcactacaatagccggcgggcaaaggggccgttcattaaagtcaactgcgcggcgctgccggaaagcttgctcgaaagtgaactgtttggtcatgaaaaaggtgcatttactggtgcacaaaccttgcgtcagggattatttgaacgagccaacgaaggtactctgctcctcgacgaaattggcgaaatgccgctggtactacaagccaaattactacgcattctacaggaacgggaatttgaacggattggcggccatcagaccataaaagttgatatccgcatcattgctgccaccaaccgcgacttgcaggcaatggtaaaagaaggcaccttccgtgaagatctcttttatcgccttaacgttattcatttaatactgccgcctctgcgcgatcgccgggaagatatttccctgttagctaatcactttttgcaaaaattcagtagtgagaatcagcgcgatattatcgacatcgatccgatggcaatgagtctgcttaccgcctggagttggccgggaaatattcgagagctttccaacgttattgaacgcgccgtcgtgatgaatagtggcccgatcattttttctgaggatcttccgccacagattcgtcagccagtctgtaatgctggcgaggtaaaaacagcccctgtcggtgagcgtaatttaaaagaggaaattaaacgcgtcgaaaaacgcatcattatggaagtgctggaacaacaagaaggaaaccgaacccgcactgctttaatgctgggcatcagtcgccgtgcattgatgtataaactccaggaatacggtatcgatccggcggatgtataacaccaaaacttgctatgcagaaatttgcacagtgcgcaattttctgcatagccgctcattctccttataaatccccatccaatttatcccttcatattcaattagttaaataactaaatccaataatctcattctggcactccccttgctattgcctgactgtacccacaacggtgtatgcaagagggataaaaaatgaaaacaaaattgatgacattacaagacgccaccggcttctttcgtgacggcatgaccatcatggtgggcggatttatggggattggcactccatcccgcctggttgaagcattactggaatctggtgttcgcgacctgacattgatagccaatgataccgcgtttgttgataccggcatcggtccgctcatcgtcaatggtcgagtccgcaaagtgattgctagtcatatcggcaccaacccggaaacaggtcggcgcatgatatctggtgagatggacgtcgttctggtgccgcaaggtacgctaatcgagcaaattcgctgtggtggagctggacttggtggttttctcaccccaacgggtgtcggcaccgtcgtagaggaaggcaaacagacactgacactcgacggtaaaacctggctgctcgaacgcccactgcgcgccgacctggcgctaattcgcgctcatcgttgcgacacacttggcaacctgacctatcaacttagcgcccgcaactttaaccccctgatagcccttgcggctgatatcacgctggtagagccagatgaactggtcgaaaccggcgagctgcaacctgaccatattgtcacccctggtgccgttatcgaccacatcatcgttagtcaggagagcaaataatggatgcgaaacaacgtattgcgcgccgtgtggcgcaagagcttcgtgatggtgacatcgttaacttagggatcggtttacccacaatggtcgccaattatttaccggagggtattcatatcactctgcaaagcgaaaacggcttcctcggtttaggcccggtcacgacagcgcatccagatctggtgaacgctggcgggcaaccgtgcggtgttttacccggtgcagccatgtttgatagcgccatgagttttgcgctaatccgtggcggtcatattgatgcctgcgtgctcggcggtttgcaagtagacgaagaagcaaacctcgcgaactgggtagtgcctgggaaaatggtgcccggtatgggtggcgcgatggatctggtgaccgggagccgcaaagtgatcatcgccatggaacattgcgccaaagatggtagtgcaaaaattttgcgccgctgcaccatgccactcactgcgcaacatgcggtgcatatgctggttactgaactggctgtctttcgttttattgacggcaaaatgtggctcaccgaaattgccgacgggtgtgatttagccaccgtgcgtgccaaaacagaagctcggtttgaagtcgccgccgatctgaatacgcaacggggtgatttatgattggtcgcataagccgttttatgacgcgttttgtcagccggtggcttcccgatccactgatctttgccatgttgctgacattgctaacattcgtgatcgcgctttggttaacaccacaaacgccgatcagcatggtgaaaatgtggggtgacggtttctggaacttgctggcgtttggtatgcagatggcgcttatcatcgttaccggtcatgcccttgccagctctgctccggtgaaaagtttgctgcgtactgccgcctccgccgcaaagacgcccgtacagggcgtcatgctggtcactttcttcggtagtgtcgcttgtgtcatcaactggggatttggtttggttgtcggcgcaatgtttgcccgtgaagtcgcccggcgagtccccggttctgattatccgttgctcattgcctgcgcctacattggttttctcacctggggtggcggcttctctggaagtatgcctctgttggctgcaacaccgggcaacccggttgagcatatcgccgggctgatcccggtgggcgatactctgttcagtggttttaacattttcatcactgtggcgttgattgtggtgatgccatttatcacccgcatgatgatgccaaaaccgtctgacgtggtgagtatcgatccaaaactactcatggaagaggctgattttcaaaagcagctaccgaaagatgccccaccatccgagcgactggaagaaagccgcattctgacgttgatcatcggcgcactcggtatcgcttaccttgcgatgtacttcagcgaacatggcttcaacatcaccatcaataccgtcaacctgatgtttatgattgcgggtctgctgctacataaaacgccaatggcttatatgcgtgctatcagcgcggcagcacgcagtactgccggtattctggtgcaattccccttctacgctgggatccaactgatgatggagcattccggtctgggcggactcattaccgaattcttcatcaatgttgcgaacaaagacaccttcccggtaatgaccttttttagttctgcactgattaacttcgccgttccgtctggcggcggtcactgggttattcagggacctttcgtgatacccgcagcccaggcgctgggcgctgatctcggtaaaagcgtaatggcgatcgcctacggcgagcaatggatgaacatggcacaaccattctgggcgctgccagcactggcaatcgccggactcggtgtccgcgacatcatgggctactgcatcactgccctgctcttctccggtgtcattttcgtcattggtttaacgctgttctgacggcacccctacaaacagaaggaatataaaatgaaaaattgtgtcatcgtcagtgcggtacgtactgctatcggtagttttaacggtagtctcgcttccaccagcgccatcgacctgggggcgacagtaattaaagccgccattgaacgtgcaaaaatcgatagtcaacacgttgatgaagtgattatgggtaacgtgttacaagccgggctggggcaaaatccggcgcgtcaggcactgttaaaaagcgggctggcagaaacggtgtgcggattcacggtcaataaagtatgtggtagcggtcttaaaagtgtggcgcttgccgcccaggccattcaggcaggtcaggcgcagagcattgtggcggggggtatggaaaatatgagtttagccccctacttactcgatgcaaaagcacgctctggttatcgtcttggagacggacaggtttatgacgtaatcctgcgcgatggcctgatgtgcgccacccatggttatcatatggggattaccgccgaaaacgtggctaaagagtacggaattacccgtgaaatgcaggatgaactggcgctacatagtcagcgtaaagcggcagccgcaattgagtccggtgcttttacagccgaaatcgtcccggtaaatgttgtcactcgaaagaaaaccttcgtcttcagtcaagacgaattcccgaaagcgaatagtacggctgaagcgttaggtgcattgcgcccggccttcgataaagcaggaacagtcaccgctgggaacgcgtctggtattaacgacggtgctgccgctctggtgattatggaagaatctgcggcgctggcagcaggccttacccccctggctcgcattaaaagttatgccagcggtggcgtgccccccgcattgatgggtatggggccagtacctgccacgcaaaaagcgttacaactggcggggctgcaactggcggatattgatctcattgaggctaatgaagcatttgctgcacagttccttgccgttgggaaaaacctgggctttgattctgagaaagtgaatgtcaacggcggggccatcgcgctcgggcatcctatcggtgccagtggtgctcgtattctggtcacactattacatgccatgcaggcacgcgataaaacgctggggctggcaacactgtgcattggcggcggtcagggaattgcgatggtgattgaacggttgaattaatcaataaaaacacccgatagcgaaagttatcgggtgttttcttgaacatcgacggcgaaggtaaccccattaatcaccagtcaaaacttttcaccagcgtcagctcgccagcattacgcatcggtacaataaatgtttcctgtttctcattgacgcttccttcatcggtgatcagcgtcagttgggcggtggttaattccgtttcgctgcgcccaccatagtagttgatatacacctgatagcgcccgtgaattggcgcgggcatggcgaaaatctcgggtccgtaccccgtcgtgacatccatatccagtgcaccactgtttttcagcacggtgttaccgtaccaggcgtgttcgccatcgggcgtaacaacgtgaaggtcgaggtcggtattgtccgtatcccagctgagaaccagccgtaaacgtgcacgaatcgttcctgtacccggcgtactgtaaaactgcattttttgtcggctttgcccatccgggctgatgacctgcacgctgttgctgccttcagtgaaaatataagggcgtgcaaaactaccatcggattcaattctctgcggcatactggcaccgttgaccaccagccggccctgctgaactttacccgccgcagcataattctttattttgccgcggatctgcgcactgatattttgatcatctgccatgttgacggagctcgccgggtaattgatgctttgactaaaactggcatcttcgccctctgccggatgccagccactgagcggtgcatcaatctcgacttcctgcacaccttcactgtgagcgacagggctaagcgccaccagtaacaacggaagaaaaatctttcgcatagcattagtccattaataattgtcgggtcagcgtttcgatatagttctcatcaagcccggtgggataaccatcaaaggccaggtgcagatactcatgggttaaatccagccgatcctgaagcgtaaagaagttacgaataaacagccgtttctgctgccgatcggtataggggaaaccactgactaaacggcaaaccgcaaacacgtctggttcgttgtaccccgtctcagcttgtaatatacgccgccactgcggcatttttttcgccagccaggctttcgctttgggtaataactggcaggtactgcgtggcgctccccagcggctaagactgttgtcgggataagcaaacgcgagtatctgatcgtaacgctctccctgccccgcctgggccgtggcttgccgccaggaaagtgtcccttcggtagcgcgactgccatgataatgaaccggatcgcctgcatagatgagatcctgcgtccaggcggtcatcgttcgcgcccccgtggtcgctgggctagcagaaacacgctgcgtggcgctgctgtcggggatggtcaggcaatcgccttcccgattggcgttttgctgtaaaaaagtgcgaatcgccacggtcatggctttcgctgcctcagggggcgtacttttcgcctcgcgatccagaactctggcaacgtactcttcacgatcgagatggctctgcaatttcagtttgcccttttcgctcagtaaggtcgtctcaccgtggctgacaaacgtaatgtggttaccattagtaaacgtcacacgatagcgcccattaagtacgccgggatttactgccgtcgtactcttttccgctgtgattttcttcagcggatagcgggcaaacagctccacctctacacattgcccactggcaacctgcgtcggcactggcaaaacccgattaagcaccgtcgcataacgggttagtaccgttttgctggtgccactgccagtaacccacagcggtgtaccatcggttaaccagccagcaaaaccaccctgacggatttcctgtttatcatcggcaaaccagctccaggttttcacccgtacccgactaccgagcatggatgcgacaccgattttcgcctcgtccagcaccacatccagtaagacttcctgagctttgttttgcgcgggtaacgtcgctaaactatcaagcaggcttttaaccgttacgctggtttctggcttcagcgtagtcagagacgctaaccacgcaggtgcctgacgctgttgccagtattgcccccacacatctgcgccaatatgcaaccgctgcggcgcaaaatagagcccacaggaacgtaccagcgcggtatcgcgcgttatgctctccccagcctgacaacaataaacctcttccggggagtttccgcgacactggtagggctgctccggttgatgggtatcctccagccaggcgtaaacatacagtttccacaaactccctaacggcgtggtgaggctgtcaggtaatgcactgactttggtcacgccactactgctcagctgatacagttgatcgtgctgcgcaccgcgcagcaccagttgtaacggcgtctcctccgcaagtgttggcagagtaaccaacgccaatagccagacgattctgcgccagttcacttatttcacctgcatcccggtccattcactccctgccgcaacactttgctgcgcaggtgcataggaacgcacataacgagcaggaggcagaacgaattgccctttttgcgagaagcgcagcaaatggcggaaagtgaccgttcccgtcagttctttcaccggcaccatataggccagttcgcccatttcatttcgcgctttttccagcaattgcccctgctgtttcgcggcgttgggtttattgaccgaaatgccccatgttgtgcgctcaacgtcggctcccggtggcagcggtacttccacctgaccgtagcgcagaactgcatcctgctcgctggtaagcgtgatttcatcgagatacagcgcatcgctgtcaatctcattgctggtcaccggttgcagaataaagctcatctcttcttcaccagggataagccgatacaactggcgttcaacggtcaccggaatgttactttgttgagccatttttgccggctcacgtcagcggacctgcacattttgcggcgataattcgtcaccaaaagagagaatgtccggcacgccctgaccaacccaacgccagtcttcgccccctccagttaacttatgtttagcccatgcgcccgcaggcgcaggcaaaacaactggaggcattgtcgccatatatttcgccagccagttcatggccagcgcgcgctcaatagtggattgctcagcggtcaaaccacttaaaatagcggccgtctgggtagcgtcgccaccgctattaagcagcacaaccgtgtgcgccagcggctgattgctgtttgccgctttatcccacgcatattgctgaacctgtggcatcaccgtggacttcaactgcgcttttttcagcaacgtcatggttaagacgtttgccaccgcatctgccagtggagactccggtgtatcgaggatcaggctatcattgatatcgcgggtgtcttcctcagagaaatcttcagttttagttccgcgccgggcgatagcttcatccaaccctttcaacaacgttttgcacggcaaattcatctcctgcgcccatgccagcaccagcgcccgatgcaataacggcatgttatctgcctgctccgcgtagctgtcgagcatatgctgccagtattccggttgttgcgttacgccgatcgcctggctggcctgccagtcggcgtaccatgcccatgccgtaaggaaggcgtcaccattgccatcttcaccccaccaggtaaagcgcgctccgggccccgccagttgcatcagccgcagacggttatcctgaatcatctgacgaatgtcgttagcggcggcactttgatgatcggcaagcgaacgccaggcgagactgagcgggatcagacggctaccggtgttgattacgccaccccacggttcatcgactaacgcatcaagattgttgcggaaaatctcctgcggcgtttcactactttgtagccggatattgctcgcctgctcgggcaacatcagcgcgttatcgccaccaccgagcatgacatttttctgctgttcaacgggccagctgttatccacaaaagacagttttgtgctaatgctgtcctgcacttgcccattttgttgcagttctgcacttaacaagccagattgctgaatattctgcgtcagcgaaatataattcgcccctttgtgcagcgtcagcgtctggcgcatctcagcgcctgcaaatttagtcaccagcgccaccggttcgttatcctgctgactgaagataaacagtcctgccgccggtttgtcgcccacgcgatacaccgttggcatactccacttcatgtagagatttttttccgaacgcagataagcacgcccctgcccgaccagcccgtcgccgttcatcccacgcgcggtgatacgccagcgggttaacgaatcaggcatcaggaacgtgaaatacgctttgccttgtttatcggttgtgagtgacggcatccatgccgcggtatccacctcttcacgccgtggacgttcaagcatttttactcgccgctcgctgcggttagttgcgccaggcgcaaccggctcgctggagagcgcctggtcgtagctgataaacgacagactggagctggtacgcacattgttacgccccagcggatagaaaaatttgccgatattcggcgcgatttctggttgcagcgcgtagatcatttcatcgaccacgcctaccgttagctgcgcagaaacaggtttacctttcagcgacgaggttaattcgacattgaccagttcaccaggctggtaatgggttttgtccgttttcacccggatatccagctggggaacggcaactttgatcccggcgttctgaaaactgtactgaccgttacgggtatacagcaccgaaaaagtgatgttaggcgcaaaggaattgctcactggaacccgggcttcatactgggtatcgtttaaacgttgtagcgttagccagtttgccggatgcgaaagcagcgactgctgttccacgcgatcgcgttccagcgtcaataatgcttcatcaattggctccggaaaggtaatcagcatcttcgcggtttcgcctggctggtacagcgttttatccgccacgatatctaccgtaccagtatgcgccgtgctgcccttaccgctgacggcatgacttaacccagcgagaattaagccgtctttatcgcgtaatgtcagattgtagttgccaggtttagcgaaattgacggtaaaggatttgccgcctgacggtagctctccgctatggctcgtgcggtcttcgagacgcaaccattcatacgtaacaggaacctgttttgaagattccagcgcggcataacggaacacaaccgactcgccgctattactgtattgtgcggcagtacttaatgagtaatgcgccagaccgcgttcaatgaggatctctttggtggtggtgacgcgatacgccgcgccgtcactggcggagacggttaacaaatagcggctcggtttatcggcggcggggagatttaacgccacatgaccgctggcgtcggacaccgtttcgctgccttccagcgacacggggaaacgtccggcataacgcaaatcgttaccgaccattgataattgctgagcgcgcaaacttaactgcacgcgggcattttttaccggctcgccatccgggtagagcagttgcagtttgccgctgaccgcttcgccagttttgaactcttttttggcgagagctaaaccaatctcgaaatgtggcttgatgtagtttgccacgcgaaaactgctgctatagacctgattgcggtaagcaagacgtaactcataacctccggctacggcattttctggcaggcggaaacttccctgcccgccattgcgcgcatccagcgtgacattgacggtttgcaacagactgccgttggcgtccagcaccgaaagcttcgccggggcgctgacgatgggggatgaatgcaacggatcgtggaactcgcggccgatcactttaacatcgacacgatcgcctgcgcgatatagcgggcgatcggtaaaaatatacaagcgggtgttgtagatttcgctttcgtagaagaagttctcggagacaaaaacgccgccttcagcatccttacccagaatgtatgaacgttctggcgatatatgttgtaactgcaaggtaccgctgtcatcggtcacaccgcgggtcatcacgccaagaccgtcagtccacaagatctctgagccgggcttcgcttcaccctgttttttacccgcggtccacaccagaagctctttgcctgacactttgctaagcgccacggtatcggaaacaaacaccaccgtcgtcgcccgatacccaccaaccatcgcctcgacgaggtacagtcccggctcttgttggccgagaggaatataaatgttacccggctgcggcgagatgaaattgctggatgcgccttccagttttaccccttgctgcggctcgaacggtttagcctgccatagtggataacggaactgtttcaccaggggatattttttcagcggggaaaactggttgttctgtacataacgggaaggtttaataatggcattgccgagctgtaattcgggtaacgcctgagtcacattctgccgtgactgagaagagaaagtacgctgcatcacgcggcgagatttgccgtaccagttatcccacagccaggttagcgtattgttcagcccgtcgcccagatattgcggttgcaccacaatgcgatgcaggtttttctgctggcgcaaaaatgccatcgggtcaggaatacgatacaggcgaacgtccacgccgccgtactcttccatctgatagcgccgataatcacgccccggcgcttccagtcgcactttcgcctcttcactgctgctaaaactgctgtcagcaagcaaaaagaatgttcccccggcaggcggcgcatagttgctggaaggaagcgaatcatcagcattagcaagccctgttcccacaagagacagggacaagcacgctgttatcgcgccagaaaatttaaacgataaatgccaatgaaattgggattggaatcgttgggtatccatcgggtgtccttccatgtcataagttgttgcagactgactgcgcgcattccgttgtcagttttcgtggcgcttccggtgtggtagatgacgtaacgccccatccagaccattaagtgctgggcatcgccctgatcgaaaaaaatcatatcgccaggcagcgcctggtttatgtcctggccaataaactggctgttgtactgaatcaaattaatcgcggtcacataggggccggttttcccgttcccctgattccagttttgcgccagttgacgctgttcaggtgttagcgtcatctctggcggcaaatactggctagataaaccgttactttttagccatttactgtcgtgaactttcagcgtctcgttcgccgcaaatcgcaccaggcccgcacaatcctgctgataccagcgtggacttggcccctggcggagctgttcttgtgcaatgcgtacaaaccaggcgcgaaacagcccggattgttcgacattcagcatttcgctatgggcaacaacacaacacagccagcaaatcagcgccagcagcccgtgcctcatagcggctgccaggttatgggtagccactgccaggcggcaccgggttccatctgggccagcttcatgacataacgcggttgttgagataaagcgtccagcttcggcattaataaagtttgtgcggcgttataaaaaaccggttcgagattcttcggcagactggtcaacgtttcgttacgcagcagtttcgctattccttgtggattgatatagagcggaacgatgccatcagtgggtattacatccaccattgccgggcgggttttattcagtgtttgcagcgcgttattaaccagcgtgtcatcgagggagaaaagcagcgttttgttttgcatcgccaggctcacacggaaaaaataatcgctcattaattgatcgggttgcgccgcctgcgctttcggatactggccgtatcgggaactcacttcgcgacgccagatttgcgcttcgccctgctgagtctggcttaccggcaaaacaccttctggcgctttgctttcgtgcgcaccaatattttgcgtaaacagtttccctggcaattgcgcctgttcggcagtgccatcaaactgaccgacaaacagcggggtttgcaatttactgtcttcataccagcacagccccgcggcaccgtctaacgccccattcagcttgtcgttttcctggctgatgtggctaagcatctcttcggcaataccgtgactatacggcaccgccacacagaagctggctccggcaggcatactgttccataccggcgtaaaatcgaaactggcatctacgctggcggattcatcatttaacgccacaaaactgtgccagccgtcgttacccatttcgaagcgtacgccagcaaaagaaggcattaaccgctggtagccaaaccccagccacctggcgctgactacgatgcgctggcgtactggcgttttttcggcagtacgctcttccaggccaaagcttgcttgccagcgttttttgccgctcaacaaatcacctgcgatcgccgtggcttcggtatcctgctgatcatctttaaacaacatatccgtgctggaaaacaccagcatcttgtcctgataagtcgcgaacatcagggcgttattgccgttatagcgcaactgataaacaggaacagtttcactatttatcttgatgctactgatttccgttttgcttaactggctgtcgctggtagcggcaaacaacaatggctccagcagtttgcttaaaccactgcgctggatcagcaccatataatgactaagatggccttgtttatcgtgccacagcgctgcctgcgcgggctgatctaagagactgctaaagagcttatctttcagcgtgagatcgtgttcatagacaatacgacgaatgctgccttcaatgcccagacgatcggcatgattctgataatagaaaacgaaatcttcgctcagaacatcgtggagaaacggaatggtgaggagatctttgggaagctggctcagagagtcgctgtcgagaaagaggtccggctcattgagatcgatttgcagattgttgtgcaccaccagcgggctcaacgttttttctggcccactgccagcatattgcaacgcccagacgccagcggaaagcagtgctattgcgccaaaacctacaagaccatagaaccgccagcctttcgcctttttttcaccactcattgccacattccttgtgtatagccagccattttttacgggcacagccaaactttaccgtgccctaatacgacaaaagcccagactttgcagcctggacttttcaattcaaacaagggagatagctcccttttggcatgaagaagtaaaattattcttcttctggctcgtcgtcaacgtccacttccggagcgatttcatcgtccccttccgcggcactgccgtcgatggtatccagatcttcctcgtcaaccggttcagcaacacgttgcagacccactacgttttcatcttccgcagtacggatgaggatcacgccctgggtgttacggcccacgatgctgatttcgctaacgcgagtacgtaccagcgtaccggcatcggtgatcatcatgatctggtcgcagtcatctacctgtaccgcgccaacaactaaaccgttacgttcggtaaccttgatggagataacccctttcgtcgcacggctcttggttgggtattccgccactgcggtacgtttaccgtaaccgttttgcgttgcggtgaggattgcgccatcgccacgaggcacgatcagagagacgactttatcgccttcacctaagcgaataccgcgaacaccggtggtgttgcagcccatcgcacggacagaagactctttaaagcgcaccactttaccttcagcggagaacagcattacttcgtcttcgccgctggtcaggtcaacgccgatcagctcatcgccgtcaaccagtttgatcgccactttaccggcggtacgcagacggttgaactcggtgaggacagttttcttcacggtaccgttagcggtcgccatgaagactttcacgccttcttcaaactcggtcactggcaggatcgcagtgatacgttcgtcctgctccagcggcagcaggttgacgatcggacgaccgcgcgcgccacgagtggcttccggcaactgataaactttcatgctatagacgcgaccacggctggagaagcacagaatatggtcgtgagtgttcgccaccagcagtcggtcgataaagtcttcttctttaatacgtgcggcagatttacctttcccgccacgacgctgcgcttcgtattcagaaagcggctgatacttaacgtagccctggtgagagagcgtcacgaccacatcttcctgggtgatcagatcttccaggttgatgtctgcgctgttggcggtgatttcagtacgacgtttgtcaccgaactgttcacgaaccagctccagctcttcacggatcacttccatcagacgatcggcgctaccaagaatacgcaacagttccgcgatctgatccagcagctctttgtattcgtcgagcagtttttcgtgctcaagaccggtcagtttctgcaaacgcagatccagaatcgcctgagcttgctgttcggtcaggtagtacagaccatcacgcacgccgaactctggctccagccattccggacgcgcagcatcgtcgccagcacgttcgagcatcgcggcaacgttgcccagctgccacggattagcaaccagcgcagttttcgcttctgcaggcgtcggcgcatgacggatcagttcgatgatcgggtcgatgttcgccagcgccacggctaatgcttcaaggatatgagcacgatcgcgagctttacgcagttcgaaaatagtacgacgggtcaccacttcacggcggtgacgaacaaacgccgcgatgatgtctttcaggttcatgatcttcggctgaccatggtgcaatgccaccatgttgataccgaaagaaacctgcaactgggtctgggagtagaggttgttgagcacaacttcaccgaccgcatcgcgtttcacttcaatcacgatgcgcataccgtctttgtcagactcgtcacgcagcgcgctgatgccttccacgcgtttttcttttaccagttccgcaatcttctcgatcaggcgcgctttgtttacctgatacggaatttcgtggacgataatggtttcacgaccggttttggcgtcaacttccacttctgcgcgagcgcggatatacaccttgccgcgaccggtacggtaagcttcttcaataccgcgacgaccgttaatgattgccgccgtcgggaagtccggccccgggatgtgttccatcagcccttcaatgctgatgtcttcatcatcaatatacgccagacaaccgttgatgacttccgtcaggttgtgcggcgggatgttggttgccatacctacggcgataccggaagaaccgttcaccagcaggttaggaattttggttggcatgacgtccggaattttttccgtgccgtcatagttatcaacgaaatcgaccgtctctttttcgagatcggccatcagttcatgggcaattttcgccagacggatttccgtataacgcattgccgccgcagagtcgccgtcgatagaaccgaagttaccctgaccgtctaccagcatataacgcaggctgaatggctgcgccatgcggacgatcgtgtcatagaccgcgctgtcaccatggggatggtatttaccgattacgtcaccaacgacacgggcagattttttataggctttgttccagtcattgcctagtacgttcatggcgtaaagtacgcgacggtgtaccggcttcaggccatctcggacatctggcagcgcacggccaacaatgacgctcatcgcataatccagataggagctcttcagctcttcctcaatgttgaccggtgtaatttctctcgcaaggtcgctcatctaaccgctatccctctactgtatcccggattcaaaggtcgcaaattataacacagccgcgcagtttgaggtaaacctatacgctttattcacatccaatgcctgatatactcgtttgtcttgccaattacggagtagaagtgccaatgaatgccgaaaaaagcccggtaaaccataacgtagaccacgaagagatcgctaaatttgaagccgtcgcctcccgctggtgggatctggaaggtgagttcaaaccgctgcaccgcattaacccgctgcgtctgggctatattgccgagcgtgctggcggtttatttggcaaaaaggtgctcgatgtcggttgtggcggcggcattctggccgagagtatggcgcgcgaaggcgcgacggtgaccggtctggatatgggctttgagccattgcaggtggcaaaactgcacgcactggaaagcggcattcaggtggattacgtgcaggaaaccgtggaagagcacgcggcaaaacatgccgggcagtatgatgtggtgacctgcatggagatgctggagcacgtccccgatccgcagagtgtggtcagagcctgtgcgcaactggtgaaaccaggcggcgatgtctttttcagcacacttaaccgcaacggcaagagttggctgatggcggtggttggtgcggaatatattttgcgcatggtgcccaaaggcacgcatgatgtgaagaagtttattaaaccggcagaattgctgggctgggtggatcagaccagtttaaaagagcggcatatcactgggctgcattacaacccgatcactaatacttttaaactcggccccggcgtggatgtgaactatatgctgcacacgcagaataagtgaggttgatgtttggccgcgccaatgcctgatgcgacgcttgccgcgtcttatcaggcctacaaatgctccccgtaggccggataaggcgtttacgccgcatccggcaaccgtgccgactagacagtgattaccatttcaccgtcatgctcaaaaaccctgccgtctgggcaaaatcatcactccctttctgccacgccacgctgccgcgcagggacactcgctgactgatattgcccgtgactcccacttttatttcaccccgttgcttcaccgcatcgtcactgatagtgctgccatcctcttcaatttccgtgctatggggatcgtgataataattcagatctaatgttggtatgacatgaacagcggtacgccattcgctgtgtaaacccagccgcgtctgaatatcatcaccctggctttgactcacgcgcgcacggttagcggcggtaaaatcatcctgctgcacgccctgataaatcacctgcgcctgcggttcaatcaccacaccacgccccggtaaccactgataccccgcctccaggctggcgataatcccgctgctgtggtaatgatctgtgccatcttcttgttcggaaacatcattgctaaaccacgcgtattgcagccagctatccagccaggccccttgcttctgattaccgtgctgaaaccagctacttgtcagcccaacggcataaccgtggttctggttatcggcgcgagttccggtcatattgctgcggctgtcgccctggttatcgctgtagccaccaacaatcccaagcatccactcgccatccgtgccccagcgcccgctaaacagatcgccgctaagttgcaccgtagaagtgtcttcatgttgagccagttgccccgctgctgtgtaatgataatctccgccgataacacgtaaattcagcgtctgaccatcgccacctgcgtgatcgcgtcgctccatcataaacgcctgatttgccgcccgcaggttattaagataaccgccaactttggcattcaacaccggctggtaagcaggcgtaggttccgggtcgggtgttggatcaggatccggcgtgggatcaggatcgggagtcgggtctggatcaggtgggcttggcggcgttacttcttggcttcgcagataccagtcgttgttatcttccaccagcgtgtagtcatacgctcccatattgacgtagccgctgcctgccagactgaactgcgcattgttttgaaactgcgtgggatcagctgcgaaatcaaccactttaatgcctgtgcttgtcggctcaccaatccctgtaatggagttaaccaccacagttgtgttgccagcagtattaccgttcatcaccaattgatcgcttacgctgtcatcgccgtttaattcgctatcgagcagtagcgtaccgccgccggtataatcaccgtttaccgtcagcgtatcgccagcgacgccattttgcaggctaaccgcaccggacgtattggtcagattgccattaaccgtcacgttggaaagataagtcaggctgtcagtttcaaggttggtattaagctcacctgtcaacgtcacaccatcggtggcattcaccagcgtcccatcgccgttaaatagactggcattaagggcgacggaagtatcctgcccggtcaggcgcaaaaccgtaccatcgctgatgtcgatagtgccgctggaaatagcatcaatactctgaatatcctgatccgcgccagtaacgaacgttgccccatcaccaacccacagactgctagcataaggaaggatatcagcaacatcacctttcagggtgccttcttcgacacgtaccgcgctctgcgttgtaccgctggcggtcagctccagtgtaccagcccccgttttagtcaatgtgctaccctcatcctgatgctgcccgctgctgtcagccatcagtgcgccccactgcgtgtctacccccgcatcaactgccacttcaccgtcggcgcgcatttcaatatcacgtccgtggcctgccgcatcactacgcgtgtcaacgtcggaggtaatctccatcacgctttcttgttgcttatcggtaaagataacctggcggttatagtgggtatctccaagctggctgttgtcgctcaccatcagcgtaccggaggcgatttgtgttgtgcccaaataactattattgtttgccagacttacctgcccgtcgctcgcatcgaccaccacgtagacgccatctttcccgtcgccgccgatatgcaaattgtcgccacctgcaagatctaccacatcctgactgccgataaccgttccgctgctgccactgacttcaaggccatcgttgtaacttgtgccgctctgccaggtggagaaatcagagagatcgagcacaccgccgtttaacacgatgctctgcggatcgtcctggagagcggtaagatctgccgcgtcgccttccaggctaagcaccgcaccatcatcaacgactatatcgccggttagcgccatgctctgcgcccctgccagcacgtagctgccgttttgcgcaatggtgagctgaccagcaccttcgatgatgccagcaaaactgccctgattaacagtaacgttgccaccagcatcgatatttaaagtgccattctgaaagcccgtcaatgcgtgcacaaaagtttgttgggtgctgccaacgtttagctcagcctgattctgatactgatcaatactccctatcgtcagaccgtagcagtcttgcggatcgtcctggcaatgcgtatcgccgacattcatcagggagttgctgcggcccagggtaacttcaccgttttcaatctgcatctcaccagtaaagtcattgttatctgcattaagtaccagatcgccggaacctgttttggtgattaacccggtaccagcaatagagtcaacagctccgtcattctctgtattgccaataaccagcgtttttccgtcggcaatatcaaaggtaacttcacttaagccgagatacataaagccacccgccgcagaggaaggaccatctccatagcctgctgcgctattgttctcatcgactaacacgcctccgttctggctgtagctgtcatcaacagaaatatcaataagatagggagccgtcacgctattggtatatatcgccccgccataaccttcggcagtgttatttgtaaaggcagtgttatttactatcgtataaccactaggatgcttgctgtcgctattattatcggtaacatcgattgccccgccatcgccatcactgtaacttgtacttgtatatgcctggttgttatcaaaaataacatcacttaaataaacgtcattattaatggtataaattgcgccacctttgccatcattagcgatgttattgcgaaacatggcgttagtgacacgtaaatcgacggcaccagtatcgttagtaccagaagaatagattgcgccaccatagccgcctgcgacgttaccggaaaaaataacatcagtaagattcagcgtactgttttctttagcaaatatggccccgccgttattatattctcctgtaacggtgttattggcaaacagagtcattccagtttcattttctggtaatagactaaattccgctccttgttgcaaaaatacggccccaccgctggcgttattggtcatatcgctaaaaaccagccattgcccatcagcgatactccagtcctgcgtaatgccactaaggctttgcctgctggcctgacaactcgctttgacatcatatccctggcaactatcagtgaccgccgcgacaccgttagcagagaaaagagatgcaatcatactcgggagtaaagataaatactccttgcgtagaaagataatccgcatattaatctaaccatcattttctataagacggcgtatttaatcgcattatacgatatggaatatctttcttttgtaaattgttcaacccggtgcaatggctattttgttattatttgatgaataatatcagtgcgtcataattcaagttaataaccttcagggatatcagttatatttaaactaaattaaagtcatgaataattttcttataatataaggtaaattaacaaaatggcttagcatttaacaataaccgaatagaaaacaaccatttcgccatcaacaatctcttacattcgcttatatattgaccacaactgatacatcagattatgtgatgactcgtgcttagatcaatttttgcaatcattagcaaaaagattaataagccatctatatcaatttatctaacctattatgccgttcaagaaatcgccgaacagttatttttaacaaatttttctcttcccattgactttcccggacaccttgtctgacctaaggtgcgcgaaagccactttttccttcctgagttatccacaaagttatgcacttgcaagagggtcattttcacactatcttgcagtgaatcccaaacataccccctatatatagtgttctaagcagcttcccgtactacaggtagtctgcatgaaactattgcggaaagaattccaaaaacaggtacgacatacatgaatcagaatctgctggtgacaaagcgcgacggtagcacagagcgcatcaatctcgacaaaatccatcgcgttctggattgggcggcagaaggactgcataacgttagcatttcccaggtcgagctgcgctcccacattcagttttatgacggtatcaagacctctgacatccacgaaaccattatcaaggctgccgcagacctgatctcccgtgatgcgccggattatcagtatctcgccgcgcgcctggcgatcttccacctgcgtaaaaaagcctacggccagtttgagccgcctgcgctgtacgaccacgtggtgaaaatggtcgagatgggcaaatacgataatcatctgctggaagactacacggaagaagagttcaagcagatggacacctttatcgatcacgaccgtgatatgaccttctcttatgctgccgttaagcagctggaaggcaaatatctggtacagaaccgcgtgaccggcgaaatctatgagagcgcccagttcctttatattctagttgccgcgtgcttgttcagcaactacccgcgtgaaacgcgcctgcaatatgtgaagcgtttttacgacgcggtttccacatttaaaattagcctgccgacgccaatcatgtccggcgtgcgtaccccgactcgtcagttcagctcctgcgtactgatcgagtgcggtgacagcctggattccatcaacgccacctccagcgcgattgttaaatacgtttcccagcgtgccgggatcggcatcaacgccgggcgtattcgtgcgctgggtagcccgattcgcggtggtgaagcgttccataccggctgcattccgttctacaaacatttccagacagcggtgaaatcctgctctcagggcggtgtgcgcggcggtgcggcaacgctgttctacccgatgtggcatctggaagtggaaagcctgctggtgttgaaaaacaaccgtggtgtggaaggcaaccgcgtgcgtcatatggactacggggtacaaatcaacaaactgatgtatacccgtctgctgaaaggtgaagatatcaccctgttcagcccgtccgacgtaccggggctgtacgacgcgttcttcgccgatcaggaagagtttgaacgtctgtataccaaatatgagaaagacgacagcatccgcaagcagcgtgtgaaagccgttgagctgttcagcctgatgatgcaggaacgtgcgtctaccggtcgtatctatattcagaacgttgaccactgcaatacccatagcccgtttgatccggccatcgcgccagtgcgtcagtctaacctgtgcctggagatagccctgccgaccaaaccgctgaacgacgtcaacgacgagaacggtgaaatcgcgctgtgtacgctgtctgctttcaacctgggcgcaattaataacctggatgaactggaagagctggcaattctggcggttcgtgcacttgacgcgctgctggattatcaggattacccgatcccggccgccaaacgtggagcgatgggtcgtcgtacgctgggtattggtgtgatcaacttcgcttactacctggcgaagcacggtaaacgctactccgacggcagcgccaacaacctgacgcataaaaccttcgaagccattcagtattacctgctgaaagcctctaatgagctggcgaaagagcaaggcgcgtgcccgtggtttaacgaaaccacttacgcgaaagggatcctgccgatcgatacctataagaaagatctggataccatcgctaatgagccgctgcattacgactgggaagctctgcgtgagagtatcaaaacgcacggtctgcgtaactccacgctttctgctctgatgccgtccgagacttctagccagatctctaacgccactaacggtattgaaccgccgcgcggttacgtcagcatcaaagcgagcaaagacggtattttgcgccaggtggtgccggactacgagcacctgcacgacgcctatgagctgctgtgggaaatgccgggtaacgatggttatctgcaactggtgggtatcatgcagaaatttatcgatcagagcatctctgccaacaccaactacgatccgagtcgcttcccgagtggaaaagtgccgatgcagcagttgctgaaagacctgctcaccgcctacaaattcggggtcaaaacactgtattatcagaacacccgtgacggcgctgaagacgcacaagacgatctggtgccgagtatccaggacgatggctgcgaaagcggcgcatgtaagatctgatattgagatgccggatgcggcgtaaacgccttatccggcctacggctcggtttgtaggcctgataagacgcgccagcgtcgcatcaggctccgggtgccggatgcagcgtgaacgccttatccggcctacggctcggatttgtaggcctgataagacgcgccagcgtcgcatcaggcacaggatgcggcgtaaaatgccttatccggcattaaactcccaacaggacacactcatggcatataccacctttagtcagacgaaaaatgatcagctcaaagaaccgatgttctttggtcagccggtcaacgtggctcgctacgatcagcaaaaatatgacatcttcgaaaagctgatcgaaaagcagctctctttcttctggcgtccggaagaagttgacgtctcccgcgaccgtatagattaccaggcgctgccggagcacgaaaaacacatctttatcagcaacctgaaatatcagacgctgctggattccattcagggtcgtagcccgaacgtggcgctattgccgcttatttctattccggaactggaaacctgggtcgaaacctgggcgttcagtgaaacgattcattcccgttcctatactcatatcattcgtaatatcgttaacgatccgtctgttgtgtttgacgatatcgtcaccaacgagcagatccagaaacgtgcggaagggatctccagctattacgatgagctgatcgaaatgaccagctactggcatctgctgggcgaaggtacccacaccgttaacggtaaaactgtgaccgttagcctgcgcgagctgaagaaaaaactgtatctctgcctgatgagcgttaacgcgctggaagcgattcgtttctacgtcagctttgcttgttccttcgcatttgcagaacgcgaattgatggaaggcaacgccaaaattattcgcctgattgcccgcgacgaagccctgcacctgaccggcacccagcatatgctgaatctgctgcgcagcggcgcggacgatcctgagatggcggaaattgccgaagagtgtaagcaggagtgctatgacctgtttgttcaggcagctcaacaggagaaagactgggcggattatctgttccgcgacggtagcatgattggtctgaataaagacattctctgccagtacgttgaatacatcaccaatatccgtatgcaggcagtcggtttggatctgccgttccagacgcgctccaacccgatcccgtggatcaacacttggctggtgtctgataacgtgcaggttgctccgcaggaagtggaagtcagttcttatctggtcgggcagattgacagcgaagtggacaccgacgatttgagtaacttccagctctgatggcccgcgttaccctgcgcatcactggcacacaactgctgtgccaggatgaacacccttcccttctggcggcgctggaatcccacaatgtggcggttgagtaccagtgtcgcgaaggttactgcggctcctgtcgcacacgcctggttgcaggtcaagttgactggattgccgaaccgttagcctttattcagccgggggaaattttgccctgttgttgccgggcaaaaggcgatattgaaatcgagatgtgaattggttgtagtgccagatacaacgcttatgcgtcttatctggcctacaacgattacatggcgtagtaatacgctttcacctgctcccagtccgctttggggattggctccagatatttttccagctggcggaagtcatgattaatcgctttatcgcgacgcaagcggcgacgacttttctccaggtcaagaaaaccagcttctgcattaccttctgttttcacatagatatggcgaacataacaacagccatgctgacgattaatgctatgcattttcttaaacgccagcgccactgctttcaacatggcttgccgtacttcgtcagaataagggcttactgcatgctgggcataccagtcagcaatgctgatgaaccccgccatatcttcagtcaccagcaacgctcgccattcaccctcaattttcaccgcttcaccaaaaacgatcttcggcacgatgacaccggcccgttccagttctttaattaccgcaacctcacggacaatcgttggtcggccgaacggataacgtacggaatgaaacagatgatgcgtcatgcgctttacatacagctttttgccgttgcgctcgacgcattgcaccccgctcataccattacggcgatagttaggctcttcaacccagtcgccctctgttgcccaccagtgattaaattcgtcgtactttgcactaactgccataccctatcgcctgtcatttttattaacgacaatgactataggtggttacctgaggaaaatcttaatgaaacgtgtcgtattaatgaatttcttttgccactactagcttgacaccgcttttacccttcatttgcagcgcatagattccaccagccactaccactaatagtgcgcccagcagataaaatgtgaatttaatcaggcggatacagcgatgaattttattcgacagggattaggcatcgccttacaaccagagttaacgctgaaaagcattgcaggtgaattgtgttccgttcctctcgaaccaactttctatcgacagattagcttgctggctaaagaaaagccggtagaaggcagtccactgtttttactacaaatgtgcatggaacaattagtggcgattggaaaaatttgatatgagacaggatggcgcatgaacgccatcctgcagtaacattactctttattaagaaattttactgccttatcagggaaatcagtaaacagcccatttacacccgctttgttatacagagcatcatataactgattcacatcaggagtgtattcaggcagtttatcactccgcacggtataaggatgcactaccagtttattctgctgagcatcttgcaccatgccagtgagtttgatattacccggctggcttgtctcctcaatcaacatatggtaatccggaccaataccatctgcatattccgccacctgtttcatggcacccggcttaaacatccagtcgtagttgtaattaacccagcttccatccggctgtttctgctgcgtttcattccagtcggtataggcaatcagctgtaccagattgagctccatgcccattttgggttccagctcattcttaatacgcttcagctcatcagcatcaaaacattgcaaataaactttatcgtctttaccggtgtaaccatatttcttcagcacttccagcgtttttgccgcaatatccttcccttcctgatgatggaaccacggcgctttgatttctggataaataccgatatttttcccggtagagtgatttaacccctgaacaaattcaatctcttcttcaaaggtgtgcacccggaagtcggacttacccattgggaaacgccccggataagtctgcacttttttaccgttttcaatatcgaaaccttcggtaaatttcaagctcttaatttcatccagcgtgaaatctatcgcgtagtaacgaccgtctttgcgcgcccgatccgggaaacgatcggcaacatcagtaacacgatcgaggtaatggtcatgcagaacaaccagattgtcgtctttggtcatcaccaaatcctgttccagataatccgctccctgcgcatacgccatcgcttttgctggcagcgtatgctccggcaaatatccactggcaccgcgatgggcgatgactattttttcgttgctgtccgccgccattgcactgcttcccatgactatagtgctcatcatgatcgccatgctaaggtttttcagcgtcaatttcatgccattagcctccgttgcgttcttgcagtaattgttcatggcgacgtttttcgccaatcatcacaacaatcaacaagataaccgccagaatgctgccgccaatcattaccataaagccgccatcccagccgaagaagtccacggtgtagccaacaatcgcgctcgccgccacgctaccgcccaggtaaccaaacagcccggtaaagcccgctgccgtacctgccgcttttttcggtgccagttccagcgcatgcagaccgatcagcatcacaggaccgtagatcaggaagccgataacaatcatacaaatcatatcgacggttgggttacctgccgggttcatccagtaaacgatagtcgcgatggtcaccagtgtcataaagaaaacgccggttgccccacggttgccacggaagactttatcgctcatccagccgcacagcagagtgcccggaatacctgcatattcataaaggaagtaggcccaggaggatttatctagcgcgaaatgcttaacctctttcagataagtcggactccagtcgaggatgccgtaacgcagcagataaacgaacacgttggcgatggcgatataccacagcagtttgttcggcagtacgtactgcatgaagatttgcttcgccgtcagctcctgttccgctttttcgttatagtcgtccggataatcatttttgtactcttcgatcggcggcaagccacaggattgcggggtatcgcgcatcatcgcaaaggcgaataatgccaccagaatggcgcagaaagcaggcatatagagcgccgcatgccagtcattgaaccaggccatccccagcaggaacagcagcggcggaataccaccaccgacgttgtgcgcacagttccacacactcacaatgccgccacgttctttctggctccaccagtgcaccatagtacgaccacacggcggccaccccatcccctggaaccaaccgcagaggaacaacagtacaaacatcaccgcaatgctgctcgtcgcccatggcacaaagcccataaacaacatcactgccgccgccagaatcaaacctgcgggcaggaaaacgcgcggattgctgcgatcgcttacgctacccatgatgaatttgctaaatccataagcaatgctgatcccgctaagggcaaaacctaaatcaccgcgactgaatccctgctcaaccagataaggcatagcaagcgcaaagttcttacgaaccaaatagtaagccgcatagccaaagaatatccccaggaaaatttgccagcgcaatcgacgataagtcggatcgatctccgcggcaggtaagcgcgctttgtgtggcgctggtttaaaaatactcaacattgatagcctccgtggcccgtggtcttatttatgattaacagcctgattcagtgagagaacctgccgtttcttgagttgccgcgatgttaagaaaacattcataaattaaatgtgaattgccgcacacattattaaataagatttacaaaatgttcaaaatgacgcatgaaatcacgtttcactttcgaattatgagcgaatatgcgcgaaatcaaacaattcatgtttttactatggctaaatggtaaaaaacgaacttcagagggataacaatgaaaactcgcgacagccaaagtagtgacgtgattatcattggcggcggcgcaacgggagccgggattgcccgcgactgtgccctgcgcgggctgcgcgtgattttggttgagcgccacgacatcgcaaccggtgccaccgggcgtaaccacggcctgctgcacagcggtgcgcgctatgcggtaaccgatgcggaaagcgcccgcgaatgcattagtgaaaaccagatcctgaaacgcattgcacgtcactgcgttgaaccaaccaacggcctgtttatcaccctgccggaagatgacctctccttccaggccacttttattcgcgcctgcgaagaagcagggatcagcgcagaagctatagacccgcagcaagcgcgcattatcgaacctgccgttaacccggcactgattggcgcggtgaaagttccggatggcaccgttgatccatttcgtctgaccgcagcaaacatgctggatgccaaagaacacggtgccgttatccttaccgctcatgaagtcacggggctgattcgtgaaggcgcgacggtgtgcggtgttcgtgtacgtaaccatctcaccggcgaaactcaggcccttcatgcacctgtcgtggttaatgccgctgggatctgggggcaacacattgccgaatatgccgatctgcgcattcgcatgttcccggcgaaaggaagcctgctgatcatggatcaccgcattaaccagcatgtgatcaaccgctgccgtaaaccttccgacgccgatattctggtgcctggcgataccattagcctgattggtaccacctctttacgtattgattacaacgagattgacgataatcgagtgacggcagaagaggttgatattctgctgcgtgaaggggaaaaactggcccccgtgatggcgaaaacgcgcattttgcgggcctattctggcgtgcgcccgctggttgccagcgatgacgacccgagcggacgtaacgtcagccgtggcatcgtgctgctcgaccatgctgaacgcgatggtctggacggatttatcaccatcaccggtggcaaactgatgacctatcggctgatggctgaatgggctaccgacgcggtatgccgcaaactgggcaacacgcgcccctgtacgactgccgatctggcactgcctggtagtcaagaacccgctgaagttaccttgcgtaaagtcatctccctgcctgccccgctgcgcggttctgcggtttatcgtcatggcgatcgcacgcctgcctggctgagcgaaggccgtctgcaccgtagcctggtatgtgagtgcgaagcggtaactgcgggtgaagtgcagtacgcggtagaaaatttaaacgttaatagcctgctggatttacgccgtcgtacccgtgtggggatgggcacctgccagggcgaactctgcgcctgccgcgctgccggactgctgcaacgttttaacgtcacgacgtccgcgcaatctatcgagcaactttccaccttccttaacgaacgctggaaaggcgtgcaacccatcgcctggggagatgcactgcgcgaaagcgaatttacccgctgggtttatcagggattgtgtggtctggagaaggagcagaaagatgcgctttgatactgtcattatgggcggcggcctcgccggattactctgtggcctgcaactgcaaaaacacggcctgcgctgtgccattgtcactcgtggtcaaagcgcactgcatttcagttccggaagcctggatttgctgagccatctgccagatggtcaaccggtgacagacattcacagtggactggaatctttgcgtcagcaggcaccagcccatccttactcccttctcgagccacaacgcgtgctcgatctcgcttgccaggcgcaggcattaatcgctgaaagcggtgcgcaattgcagggcagcgtagaacttgctcaccagcgggttacgccgctcggcactctgcgctctacctggctaagtagcccagaagtccccgtctggccgctgcccgcgaagaaaatatgtgtagtgggaattagcggcctgatggattttcaggcgcaccttgcggcagctagcttgcgtgaactcggccttgccgttgaaaccgcagaaatagagctgccggaactggatgtgctgcgcaataacgccaccgaatttcgcgcggtgaatatcgcccgtttccttgataatgaagaaaactggccgctgttacttgatgcgcttattcctgtcgccaatacctgcgaaatgatcctgatgcccgcctgcttcggtctggccgatgacaaactgtggcgttggttgaatgaaaaactaccttgtagtctgatgcttttgccaacgctgccgccttccgtgctgggcattcgtctgcaaaaccagttacagcgccagtttgtgcgccagggtggcgtgtggatgccgggcgatgaagtgaaaaaagtgacctgtaaaaatggcgtagtgaacgaaatctggacccgcaatcacgccgatattccgctacgtccacgtttcgcggttctcgccagcggcagtttctttagtggcggactggtagcggaacgtaacggcattcgagagccgattctcggccttgatgtgctacaaaccgccacgcggggtgaatggtataagggagatttttttgcgccgcaaccgtggcagcagttcggtgtaaccactgatgagacgctacgcccgagtcaggcagggcaaaccattgaaaacctgtttgccatcggtagcgtgctgggcggatttgatcccatcgcccagggatgcggcggcggtgtttgtgccgtcagtgctttacatgccgctcaacagattgcccaacgcgcaggaggccaacaatgaatgacaccagcttcgaaaactgcattaagtgcaccgtctgcaccaccgcctgcccggtgagccgggtgaatcccggttatccagggccaaaacaagccgggccggatggcgagcgtctgcgtttgaaagatggcgcactgtatgacgaggcgctgaaatattgcatcaactgcaaacgttgtgaagtcgcctgcccgtccgatgtgaagattggcgatattatccagcgcgcgcgggcgaaatatgacaccacgcgcccgagcctgcgtaattttgtgttgagtcataccgacctgatgggtagcgtttccacgccgttcgcaccaatcgtcaacaccgctaccagcctgaaaccggtgcggcagctgcttgatgcggcgttaaaaatcgatcatcgccgcacgctaccgaaatactccttcggcacgttccgtcgctggtatcgcagcgtggcggctcagcaagcacaatataaagaccaggtcgctttctttcacggctgcttcgttaactacaaccatccgcagttaggtaaagatttaattaaagtgctcaacgcaatgggtaccggtgtacaactgctcagcaaagaaaaatgctgcggcgtaccgctaatcgccaacggctttaccgataaagcacgcaaacaggcaattacgaatgtagagagcatccgcgaagctgtgggagtaaaaggcattccggtgattgccacctccagtacctgtacatttgccctgcgcgacgaatacccggaagtgctgaatgtcgacaacaaaggcttgcgcgatcatatcgaactggcaacccgctggctgtggcgcaagctggacgaaggcaaaacgttaccgctgaaaccgctgccgctgaaagtggtttatcacactccgtgccatatggaaaaaatgggctggacgctctacaccctggagctgttgcgtaacatcccggggcttgagttaacggtgctggattcccagtgctgcggtattgcgggtacttacggtttcaaaaaagagaactaccccaccagtcaagccatcggcgcaccactgttccgccagatagaagaaagcggcgcagatctggtggtcaccgactgcgaaacctgtaaatggcagattgagatgtccacaagtcttcgctgcgaacatccgattacgctactggcccaggcgctggcttaaactcctttctgatgcccggtaagcatgtggttaccgggcatttttgcgtacacgattccgtgcccaatgtatgcgttgcaacgcagtgaaaattcctctgaaaacgtctcgcaaaggctgaaactggcagatgtcaaaggcctgggataaccgtaatgtcgcgtcatcataaatatcaggtgacggacaaccatgaccgaaagtacaacctcctccccgcatgatgcggtatttaaaacctttatgttcacacccgaaaccgcacgggattttctcgaaatacatttaccagaaccactgcgcaagctttgcaacctgcaaaccttacgcctggaacccactagttttattgaaaaaagtttacgcgcttactacagcgatgttttgtggtccgtggaaaccagcgacggtgacggctatatctactgcgtgattgaacatcaaagctctgcagaaaagaatatggcttttcggctaatgcgctatgccactgccgccatgcagcgtcaccaggacaaaggctatgacagagtcccgctggtggtgccgttgctgttttatcatggcgaaaccagcccttacccgtacagtctcaactggctggatgagtttgacgatccgcaacttgcccggcagttgtacaccgaagcttttctgttggtggatatcaccatcgtacctgacgatgagatcatgcaacatcggcgtatagctctgctggaactgattcaaaagcatattcgcgaccgcgatttaatcggcatggtcgacaggatcaccacgcttttggttagaggcttcactaatgacagccagctacaaacactgtttaattatctgctgcaatgcggcgatacctcccgtttcacccgttttattgaggagattgccgaacgtagtccactacaaaaggagagattaatgactattgctgaacggctacggcaggaagggcatcaaattggctggcaggaaggtatgcatgaacaagccattaaaattgctttgcgcatgctggagcagggctttgaacgtgagattgtgctggcgacaacccaactcactgatgctgatattccgaactgtcattaaaaggagagattaatgactattgctgaacggctgcggcaggaaggacatcaaattggctggcaggaaggtaaattagaaggtttgcatgaacaagccattaaaattgctttgcgcatgctggaacagggctttgatcgtgaccaggtgctcgcggccacccagctaagcgaagccgatctggcagcgaataaccactaattaacacaggcccacagccgatccccatgggcctttgatatcaataactaccttttatgcgtggcccatttttgccacttttaaacatcgccagtcgttgatccagggcatcgctgtagagcatcgtgtcaacgccaacagcgacaaagttcgctccccacgccaggcattgctgcgccatatcaggagccacagccagaaaaccagccgctttacccgcagcacggatccgccgaatactggtttcaataattcgctgcacttccgggtgcccggcgttatccgggtagcccaagctcgcagaaagatccgcaggtccaataaacacgccatcaatcccttcgacgtcgaggatttcgtccaggttatccagtgccgttttactttccacctgcaccaacagacaaaggctatcgttaacttgcgccatgtaattctcaatgcgtccccagcgcgcagcccgtgccacactggccccgacaccacgctcaccgtagggaggatagcgcgtggcagacaccacctgacgtgcctgttcggcagtatcgaccatcgggatcagtagagtttgcgcgccaatatccaggacttgtttaatcagcggtttactgccttccaccggacggatcacgggttggctggcatagggcgctaccgcctgtagctgatgataaagatcctgaatggtgtttggcgcgtgctccccgtcaatcagcaaccagtcataaccagaagtggcggcaatttctgccatataggcagtcgtactgcttaaccacagaccaatttgcacttcgcccttgcgtaaacgttctttaaagggattgcttaataatgcgttcatcgtgttccttaacctatttaatgatgtgccacgtcggtctgcgcaacagtgcgatttacacgcagagtgaaaataatcaggctaccgatgaccgccaccgctgccagcgtcagtaatcccgccgcatcgctggcaaataacgtttctgctttcacgcgcaggatcggggcaataaacccgcccactgcaccaaacaggtttacaaaaccaattcccgcagccagcgccgtaccggaaagcagttgtgtcggcatcgtccagaacactggctgcacggcaataaacccgatagctgcaacacacagcgctacgatcgccattactggagaaagcagcccggacagaccaataccaatgcccgccgccagtaatgtcagcgctgcgacattacgccgttcgccggttttatcggaatagcgcggaataagccaggtcccaaacaaggccgcaacccacggaatggcggtgaccacgctcgctgtaaagcccacttttgttcccagcaatgccgcaacctgggtcggcaggaagaaaattaatccgtaaaccgccacctgaatggtcaggtagataatcgctagttgccagactcggccattacgcagcgcatcgctcagccgagaagtcactttctgttgttcttcacttgccagttgattgataagcaacgttttttcttgtttactcagaaaacgtgcctgctccggtgtgtcatcaagccaaaagaatgtgaataccccagcaccgactgccaacaatccttcaatcacaaacatccagaaccagccgggatgccccataaatccatgcatctccaacagcgcgccggaaagcggacttcccagtgttaacgccagcggtgcgcccatatagaacagccccataatgctggcgcgattacgctgcggaaaccattggctggtgagataaatcataccagggaaaaatccggcctccgcagcacgaagcagagtgcgaactatcagaaatttcgcttcagtatcggcccatgccatggctgcgctaagaaatccccacagcagtgttgtcgtaccaatccaggttctggcccccagtttgcgcatcaaaagattcgccggaacacccagaaacgcatataccacaaagaaaatgcctgctcccagcgcataagcttcattactcaacccggtatcaatctggtaggtctgtttggcaaaaccgatattgctacggtcgagaaacgccagcacatacagcgccaacataaacggaattaaacgcacacggtttttcttcaccacggcgtcaagcaaagcggtgctcataaaaagctccttagaatatgtgggcgttaccgttgtcacagcaacgcccggagtgattagtggctgtaggggcgtttcaaattgcagtcacgattgagttcgacgccaaaaccgggtttatcaagcacacttttatgaatacgaccattcaccggaaccggctcattgagcagaatcgggtcaaactgcggacgcatcgtactacaatccgggctggtcatcaggaattcgctgaatggcgtattggtgaaggtgatcaccgcatggtgagagtaaacagagctaccgtgcggcaccaccagttgccccctggatttggcgattgcggcaatttccaccagcgtggttaaaccaccgcaccagccaacatccggctgcataatgtcgataccggtttcactaagcgtacgaaaagattgcagtgtgccgtggtgctcaccgctggtgaccatcattccgactggcgcgttgcgtttcagttcgcgataactttcatactgctgtggcggcaggcactcttcgatccatttcaggttatagggcgcgcaagcgtgggccagtttggtcgcatagttcacgtcctgactcatccagcagtcgagcattaaccagaaatcctcaccgcatttttcacgcatatccgcgaccatagcggcatctttgcggatccccgcatcgccatcatgtggcccccagtgcgtcggcattttgccaccgataaagcccatctcttttgccagatccggacgcgcacctgtggcgtagaactgaatctcatcacgaacagcgccgcctaaaagtttataaaccggaagcccgaccactttgccgaacagatcccacagagccagatcgacacaagaaatcgtattcatcaccaggccaccagagccggagtaatacagggtggcactgagcatttgatcgtggatcagtttgatatcactgacacatttaccctcaatgaaacggttaagatgtttttcgacaataaaacagcccatttcaccggctgtgctaacggcgaatccggtctggccgttttctgcttcgacttcaacaaccaacgtgccaagaacgttaatgccaaaactctggcgactctgctcgtaatcgcggtatttactcatcggggtggcaatatgatcgtctatccagtgattcgccccctggtcgtgataatcaccgccgccagcgcctttttctgctgtcgcaccgccagtaaaccaggcgcgaacctgtttaatttttggtagggtcatgatgttctccattgttaactggcttgtaagtcaaagggacttttccatcccaacagacgactaatatccctggcgcaggcaatggccttgcccgccagataatcacggtattcttcattgatttgtaagcgggtaccgaccacgctgatcgcagcggtaagctcgttattggcgttaaacaccggcgcagcgacacaacggacatcggcgtaatcttcgccgttgtcatagctccagccctgacggcgaatacgcgccagttcttcgtgaagttgctgtggatgagtaatcgttgtgggtgtcgcctgctcccagaccagcccttcgataatactttgctgtaccgctgcaggttgccaggcaagcaggcatttacctattccggagcgataaaggctaaggctttttccttcatgggaacgcacgctgatagtggcactactctccactttcaaaatgtaataagcgctgccgttatcaataatccccaggtgacataacagcccggtggtatccatcagttgcgtcaaacgcggtcgagccagttcccggagatccatcttgcttaacgcatgaccggaaagctccaccagcctggtccacaaacaaaaattttcctggtgatcaaggctaagaaaacgctgacgcctgagttcattaagcagcaaataggccgtgcttttagggattcccaatgtgtcaatgatcgtcgcagcactacaggggccaatgcgggcaatcaaattgagaatatcaatagcccgtgtcagggcgggaactttgctactttccaacatactggactccagtcttagatactggaatcagtctcgttgctcagggggagtaaaattgtgaagcgcatcaaatcccgctcctcgtccagcagactggagaaattacgcacaaatttgtgaatcagcgcacggattttttcttattgagtacaacaggttggacaaattttgccggagggggaatgtgccggtgcagtaaaccggcacagagtggcggaatcagacagataaggtcatggactcaacaacctcaatccagccatgctcactggcgatatcctggccgtttaaccaacggcgcagcatattcagtgccatcattgcgcacacttcctgacggatagccaggctgtagcgcgtagtgctgaaacgcacacgcagagcgaaagtgccgtctggcgtggctagcgcaaagttgagatgctcgttctcgaaaccgctaacagccagtgccagcccggcaaaatggttggcccgccgttctgtaatccagtgcgcagtttgcgccagggtttcctcctgactaggaaccacttcacacgccagcaatggagcacctgcgcgagaaagttgcaaagccaataaaccaccggtgaattgctcgctcaacgtcaggctgaactggcggttttgcaattcgcgactgatctgcgcgggcagtccttcagtgccttcgaaaatcacgctctgtccggcaacacgtttaacatccagccacagtttttccatcgcctgttgctcgcttgccggtccggtgagtttcagttcgatgataggcatactggagcgatagcccattgttacgcccggcggcagttgtagagtgtccaggctttgtgccagatcgctttcgctacgaccaaaagtagtcaaacgcagacaaaccggcggctgcggtaaagaaaaacgctcgcgcaggcgcggcaggatttcgtgctcgaccatcaccttaaattcactcggtacgccgggagtaaagaacatcaggcaacgattaagctgcacggcaaaaccacaggcggtgcctaccgggttattgataaattcagcactggcaggcagctccgcttgtttacggttgctcggtgccattactcgtccacgttcgtggaaatagcgttccatctctttgagccaggcttcatgcagcaccaggccttcaccttttgctgtcgcagcggcgagtgcgcttaaatcatcgctggtcggtcccagcccgccgttaacgatcagcacatcggcgtgctgactacgttcgcgaagaatggtgactaagtcatcaaggttatcccccaccgtattgcggcgagataatggcaacccctgatgaaagaaaaaatcggccagccaggcagcgttagtgtcaacgatttgcccgtgtaacacttcatccccggtggataacatttccacttttaacatggttatctcctgcttttgttatcgaatcactataacgcaaagggagataaggcgtagtaagaaactgaatggcgcgacagaatgccgcgccggaagggatcagaaactggcgttaaccccaacatacgggccgtcagccacggcgttgtcgcggttaccgtctttaccgctcagattcaggtagcgataacccgcctcaatactgactggacgcataatggtgtaacgcgcgccagcattcgcttcttcataactttgaataccgctggagaggctatccggagagtagtaatactcgccaaacaaacggaagctgttgccaattttccactgcaaaccacctcctaccgctgcggcataaccttcatcgccgtaattcgggttggtgtaaacgccttttccgccaacggtcgccattaacggcccgagaggcagattcaaccccagccccacgccagcgacatcaccgtcgtcgtcgttatgtgtccagttaccgcttaacgccaggcccgtcgtttcagtcccaaaaccgacaccaatattggtgtattctttacccgcctgaccgctgatgctcattgcattgacgcttgcagaaaccaacagcattccggccagacctgctagcgcaatttttttcattatcccctttcccacaagcaattaatcaaaattcccaaagctgcgggattgtactgcctggcacagaggattcaatgagcgaaaaaaaggatctagtcacttattgtaactaaatacttcttaaataattaaatgccgaaaaaataaacacactttatcgatacacacaaaaataataataagtacagttatcatcgcaaaagagattactgtcactttcacatatttgtgagttaccgtattctcatggtttctttttatttataaggaatatccctgtgcgacaacggactattgtatgccctttgattcaaaatgatggtgcttatttgctgtgtaaaatggccgacgatcgcggcgttttccccggtcaatgggcgattagcggtggcggcgtggagcctggcgaacgaattgaagaggcactacgccgcgaaattcgcgaagaactgggagaacagctgcttttgacagaaatcacgccgtggaccttcagcgatgatattcgcaccaagacgtatgcagatggtcgcaaggaagagatttatatgatttacctgatttttgactgcgtttctgccaaccgagaagtgaaaataaacgaagagtttcaggactacgcgtgggtaaaacctgaagatctggtgcattatgatttgaatgtcgccacccgaaaaacgttacgtttgaaaggtcttctgtaacaatgatgacagccattactggctgtcagattgaaaatttagtggttaacgaattccccatccagataaactttgcctttttccacatgcatgactaaaccatccagataatcaggtttaaatgtcgcgtcacgcttatctttagcaatatatgtcaggcaatgattatgggtgaaaataacgatatttttatcaggcgctttgctttgtaagtccttaattgcactataaatctcattaccgcactgaagaagtcgtttatctaccgtcaattttttacccgcactaaaccaggtagcgctctgaatggtccggacggtattactggaataaagatcgaaatcagggatatcagcactaaaagcgttgcccagttcacgggcatcctgggtacctttaaccgtaatacctgttttatcactcaagcattgattggtactacggtcgcaacgttcagcatgacgaaacaaaacgacaaccgggtgctgctgtgccagtctggccagtgttttattgtcgatacgtggcaaaccattgctactccaggcggcatgagtacccagtccggcaattgcagcgagcgccagtaaaatgatgatatattttttactcttcaagctagagcggcaaaaagctaacacgtaaactccacctatagacaagcgcaaccagacaattaccgtgaaattgagctacatttctggcgataattcgcagttggtgtaatattaaaaatcctacgatgtcggcaaaatgcctcaaaattttgccaaatgcaaagcctaaataagaaaaaatataaaaatttcaatatttacgtctaatattagtttcttaaggttaagttaatattctatccttaaaatttcgctccaaatggcaaaatatacacaacactctttatagcaaatataagtggacaggtattcaatggcggaaggaaaagcaatgagtgaatttttgccttttagccgaccagcaatgggcgtggaggaactcgctgcagttaaagaggttctcgaatccggttggatcacaaccggtccgaagaatcaggcgcttgagcaagctttttgccagttgacgggaaatcagcatgccatcgcggtcagtagtgccaccgccggaatgcatatcacgctaatggcgttgaaaattggcaagggcgatgaagtgattacgccttccctgacctgggttagtaccctcaatatgatttccttgttgggtgcaacgccggtaatggtggatgtcgaccgcgatacgctgatggtcacgcctgaagctatcgagagtgccattacgccacgcactaaagccatcattccggtgcattatgccggtgcgccagcagatattgacgccattcgcgccattggcgaacgttacggcatcgcagttatcgaagatgctgcccatgccgtcggtacgtattacaaagggcgacatattggcgcaaaaggtaccgctatttttagttttcatgccattaaaaatattacctgtgctgaaggtggcctgattgtaactgataatgaaaaccttgcccgccagctacggatgctgaaatttcacggtctgggtgtcgatgcctatgacagacaaacctggggccgtgcaccgcaggctgaagtcttaacaccgggctataagtacaatctgaccgatattaacgccgcgattgccctgacacagttagtcaaattagagcacctcaacacccgtcggcgcgaaattgcccagcaatatcagcaagcactggcagctctcccctttcagccattaagccttcccgcctggccgcacgttcacgcctggcatctgtttattattcgtgtcgatgaacaacgttgtggtatcagtcgcgatgcgttgatggaagcgttaaaagaaagaggcattggtaccgggttacatttccgcgccgctcacacacaaaaatattatcgcgagcgttttcccacgctgagcttaccgaataccgaatggaatagcgaacgcatctgttctttgccgctgttcccggatatgactaccgccgatgccgaccatgtcatcacagcccttcagcaactcgcaggacaataagccatgtttgaaatccaccctgttaagaaagtcagcgtggttattcccgtttataacgagcaggaaagcttaccggaattaatcaggcgcaccaccacagcctgtgaaagcttggggaaagagtatgagatcctgctgattgatgacggcagtagcgataattccgcgcatatgctggtcgaagccagtcaagcggagaacagccatattgtgtctattttgcttaaccgcaattacgggcaacatagtgcgattatggcgggattcagtcacgttactggcgacttaattattacccttgatgccgatctccagaatccgccagaagaaatcccccgcctggtggcaaaagccgatgaaggttacgacgtggtagggactgtacgccagaaccgccaggacagctggtttcgtaaaaccgctagcaagatgattaaccggcttattcagcgcaccactggcaaagcgatgggtgattacggttgtatgctgcgcgcctatcgccgtcatattgtcgatgcgatgttgcactgccatgaacgcagcacctttatcccgattctggcgaatatcttcgcccgccgtgccattgaaattccagtacatcatgccgagcgtgagtttggtgaatccaaatacagttttatgcgcctgattaatttgatgtacgacctggtgacctgccttaccacaacgccgctacgtatgctgagtctgctcggcagcattattgcgattggaggttttagcattgcggtgctgctggtgattttacgcctgaccttcggaccacaatgggcggcagaaggcgtctttatgctatttgccgtgctgtttacttttattggcgctcagtttatcggcatgggattactcggtgaatatatcggcaggatctacaccgatgtccgcgcccgcccccgctattttgttcagcaagttatccgtccatccagcaaggaaaatgaataatgaaaaccgtcgtttttgcctaccacgatatgggatgcctcggtattgaagccctgctggctgccggttacgaaattagcgccatttttacccatactgataatcccggtgaaaaagccttttatggtagcgtggctcgtctggcggcggaaagaggcattccggtttatgcgccggataacgttaatcatccgctgtgggtggaacgcattgcccaactgagcccagatgtgattttctctttttattatcgccatcttatttacgacgaaattttgcagctcgctcccgcaggtgcatttaatctgcatggtagcctgttaccaaaatatcgtggtcgcgcgccgctgaactgggtgctggtcaacggtgaaacggaaactggcgttacattgcaccgaatggtgaaacgtgccgatgccggggccattgtggcgcaactgcgcattgccattgcgccagacgatatcgctattacgctgcatcataaattgtgccatgccgcgcgccagctactggaacagacattacccgccattaaacacggtaatattctggaaatcgcccagcgcgaaaacgaagccacctgttttggtcgcagaacgccggatgacagtttccttgaatggcataaaccggcatccgtactgcacaacatggtacgtgccgttgccgatccgtggccgggtgccttcagctatgttggcaatcagaaattcaccgtctggagcagccgtgttcatcctcatgccagcaaagcacagccggggagcgtgatttctgttgcgccactgctgattgcctgtggcgatggcgcgctggaaatcgtcaccggacaggcgggcgacggcattactatgcagggcagccaattagcgcagacgctgggcctggtgcaaggtagtcgcttgaatagccagcctgcctgcaccgcccgacgccgtacccgggtactcatcctcggggtgaatggctttattggcaaccatctgacagaacgcctgctgcgcgaagatcattatgaagtttacggtctggatattggcagcgatgcgataagccgttttctgaatcatccgcattttcactttgttgaaggcgatatcagtattcattccgaatggattgagtatcatgtcaaaaaatgtgatgtcgtcttgccgctggtggcgatagccacgccgattgaatatacccgcaacccgctgcgcgtatttgaactcgattttgaagagaatctgcgcattatccgctactgcgtgaagtaccgtaagcgaatcatcttcccgagtactagtgaagtttatgggatgtgtagcgataaatacttcgatgaggaccattctaatttaatcgtcggcccggtgaataaaccacgctggatttatagcgtaagtaaacaattacttgatcgggtgatctgggcctatggcgaaaaagagggtttacagttcaccctcttccgcccgtttaactggatgggaccacgactggataaccttaatgcagcgcgaattggcagctcccgcgctattacgcaactcattctcaatctggtagaaggtagtccgattaagctgattgatggcggaaaacaaaaacgctgctttactgatattcgcgatggtatcgaggcgttataccgcattatcgaaaatgcgggaaatcgctgcgacggtgaaattatcaacattggcaatcctgagaacgaagcgagcattgaggaactgggcgagatgctgctggcgagcttcgaaaaacatccgctgcgccatcatttcccaccgtttgcgggctttcgcgttgtcgaaagtagcagctactacggcaaaggatatcaggacgtagagcatcgtaaaccgagcatccgcaatgcccaccgctgcctggactgggagccgaaaattgatatgcaggaaaccatcgacgaaacgctggatttcttcctgcgcaccgttgatcttacggataaaccaagttgacctaagatcttacggataaaccatcatgaccaaagtaggcttacgcattgatgtcgatacctttcgtggcacccgtgaaggcgtgccgcgtctgctggaaatcttgagtaagcataatattcaggccagcatttttttcagcgtcggcccggacaatatgggccgccatctctggcgactggtgaagccacagtttttgtggaagatgctgcgcagtaacgcggcaagcctttatggctgggatattttactggcaggtacggcctggccaggtaaagagattggtcatgccaatgccgatatcattcgtgaagcggctaaacatcacgaagtcggcctgcacgcctgggatcaccatgcctggcaagcccgtagcggtaactgggatcggcaaacaatgatcgacgatattgcacgcggtcttcgcactctggaagagattatcggtcaaccggtaacctgttctgccgctgcgggctggcgtgccgaccagaaggtgatcgaagcaaaagaagcgttccatttgcgctacaacagcgattgtcgtggggccatgccgttccgtccattgctcgaaagtggaaaccctggcactgcgcaaattccggtgaccttacccacctgggatgaagtgattggtcgggatgtgaaagcagaagattttaacggttggttactcaaccgcatcctgcgagataaaggcacgccggtttataccattcatgcagaagttgaaggctgcgcttatcagcataattttgtggatctcctcaaacgcgcagctcaggaaggcgtgacattttgccctttaagcgaactgttaagtgagacgttgccgctcggacaagttgttcgcggaaatattgccggacgtgaaggctggctgggttgccaacaaattgcgggtagtcgctgatgaaaagcgtacgttaccttatcggcctcttcgcgtttattgcctgctattacctgttaccgatcagcacgcgtctgctctggcaacccgatgaaacgcgttatgcggaaatcagtcgagaaatgctggcatccggcgactggattgtgccccatctgttagggctacgttatttcgaaaaacccattgccggatactggattaacagcattgggcaatggctatttggcgcgaataactttggtgtgcgggcaggcgttatctttgcgaccctgttaactgccgcgctggtgacctggtttactctgcgcttatggcgcgataaacgtctggctctactcgccacagtaatttatctcagtttgtttattgtctatgccatcggcacttatgccgtgctcgatccgtttattgcattctggctggtggcgggaatgtgcagcttctggctggcaatgcaggcacagacgtggaaaggcaaaagcgcaggatttttactgctgggaatcacctgcggcatgggggtgatgaccaaaggttttctcgcccttgccgtgccggtattaagcgtgctgccatgggtagcgacgcaaaaacgctggaaagatctctttatttacggctggctggcggttatcagttgcgtactgacggttctcccttggggactggcgatagcgcagcgggagcctaacttctggcactattttttctgggttgagcatattcaacgctttgcactggatgatgcccaacatagagctccgttctggtactacgtgccggtcatcattgccggtagcctgccgtggctgggattactccccggtgcactgtacacaggctggaaaaaccgcaagcattccgcaaccgtctatttgttgagctggacgataatgccgctgctgtttttctccgtcgctaaaggtaaattgcccacctatattctttcctgctttgcatctctggcaatgctgatggcgcattacgctttgctggcagcaaaaaataatcctctggcgctgcggattaatggctggattaacatcgcttttggcgtcactggcattattgccacatttgtggtctccccgtggggaccaatgaacacgccggtgtggcaaaccttcgagagctataaagtcttttgtgcctggagcatttttagcctatgggcatttttcggctggtacaccttaacaaacgtcgaaaagacctggccttttgccgcgctttgcccgctggggctggcgttgctggtaggatttagtattcctgacagagttatggaaggaaaacatccgcaattttttgtcgagatgacacaagaaagtcttcagccaagccgctatattcttactgatagcgtcggtgttgccgcaggtctggcatggagcctgcaacgcgatgacatcatcatgtatcgccagacaggtgagttgaaatacggccttaattatccggatgcgaaagggagatttgtcagcggtgatgagttcgcaaactggcttaatcaacatcgtcaggaggggattattactctcgtgcttagcgttgaccgcgatgaagatatcaacagtctcgccattccgcccgcagatgccatcgatcgtcaggagcgtctggtgctgattcagtatcgtcccaaatgatctggctaacattagtctttgccagcttgcttagcgttgccgggcagttgtgtcagaaacaggcaacctgctttgtggcgataaacaaacggcgcaaacatatcgtgctgtggctgggactggcgctggcttgtcttggtcttgccatggtgctctggctgctggtcttgcagaacgtaccggtaggcattgcttacccgatgttaagtctgaattttgtctgggtgacgctggctgcagtaaaactgtggcacgaaccggtaagcccgcgtcactggtgtggggtggcgttcattattggcggcattgtgatcctcgggagtacggtgtaatgggcctgatgtggggattattcagcgtcattattgccagtgttgcgcaattaagcctgggttttgcggcgagtcatctgccgccgatgacgcacttatgggattttatcgcggctctgttagcttttggcctggatgcccggatactgttactcgggctgctgggttatctgctttccgttttttgttggtataaaacgcttcataaacttgcgctaagcaaagcctatgccttgctcagtatgagttatgtgctggtatggattgctagtatggtacttcccggctgggaagggacttttagcctgaaagcactactgggagtagcctgtattatgagcgggttgatgctgattttcctgcccacgacaaaacaacgttactgagttttccctgccactttacactgccgttcccactcatcggggctataactgcttgcgctgaggactttcaccgtatgcagcttttcacgattaatacaataaagcgcattctgcaaagggctgagtaaatcccccactttcacggcgaagtcactcttcacttcggcgatcatttttatcgcgccgccagcatcgcagagcataagtacatgtctgttatcttgtttattgcagcagctttttttgaccagccattccattgcattatcctgtttgctaagagttttcacatcaatttacagattaacagataaactctttatcaacggcaatggaatggcagaaatgagaagtgaaacggagggttaattattgctgacgttgcacccactcttttagcgcctgacgactaattttaataccgccgtttttcagctccggcggcagagttagccagcgcaccggttgttgaaaacgggccagcttatctttcacccattcactaagatcaacgctctcgtggtcatactccatcaccgccaccggtcgatgaccaaactccttgtcggcaacggggacgataaacacctgcaaaaccgcaggatgtgcagcaattacgcgctcgacttcttccggctgaataccctctccgccactgaagaatagattgtctaaacgtccgacaatggtcagcttgccattatgcatctcaccgcgatcgcgcgtagcgtaccagccttcgtcattaaccagactaaccagttgcccgttacgccagtaaccttctgccatactggcagcccgcagccacacttcattattaacgattttcacttcccgacccggcagcgggctaccaacgtctgccaggccgtcggcttctttcgcacacaccgtggaggcaaactcggtcagaccatagccgcaaaagcaacgaatcccctgctcgcgcgcctgttccgtcaactcgaccgggatagccgcgccgccaagtaacaccgctttcagggaaacggaactacggttaaccagcaaacgccagagttgtgttggcaccagactagcgtgagtacagcctgccagcatttgctccaatggctgtttatcacgtaccgtcatccgcgcaccagcgtataaccagcgccacataattccctgaccggagacgtgaaacagcggtaaagagagcaaccaatcatcgtgatcgccaaacggaatcaggcttaacacaccttgcgcactggcaagatgggcctgataagtatggacagcggctttcggcaaaccggtagaaccgctggtcaacgtcatactgcacagacgcgtcggctgccacgtagcggcatgtgcgccttcaaccagctgaatgtgcaggctcgttaatgccggaaacgtgttttccccatccggcaccagagcaaattgcagcgtcagattgggcagcaattcttcaagcaacggttgcggcagctgagggttcacgggcaacacccgcgccccgcattgcagtaacgccagccaggcgagcagcgtttgcggcgtattccacgcccgcaacatcacgccgctgccctcaaccaccccctgcaccgcaaatccggaggctaattcatcgacgcgagcacaaagctcgcgccagttgagttgctcgtcattaagacgtaaggcgatggtttctccccgcacttgccgccagtgacgccacggccagtcagagaagatcataacaaccgctccagtgcatcaacttccacgacaggcagcgtgctacccggccagcgacgtacctgctgcgcctgcatcagatccagcgtgtccagccctggaatggtgtccggcgttaaccaggcggcaatccgcgccagttgcgttaagcctaagctgctttcaatggaagaactgatcaccgccgtcagccccagcgcgtgcgccgcctgtacctgctcgcgtactttttccagactgcccgtgagcgtgggtttgataactaccgcgcgcacgccctcttcagccacaaaggcaaaatccggctcgcgcaggctttcatcccaggcaatggcaatgccggtttcacgggcaaacgctcggctatcatcgcgggttttgcacggctcttcgagaaacgcgatgcggtcgcgataatccgggttaacgtatttggcaaactgctgacctttcagcggtgtccaggcgcgatttgcgtcaagacgcaaatgcagatccggaattgcctccagcaacagattcaccaccatgccgtcgcgcaccgcttcgtacaatcccactttgaccttcgccactttctcgcctggcatatctgcaagtttgaggatcagatcgtccggatcgccattacacagcggtgccgcacggtagttggctgcttgcggcaacgtatctgtcagttctgccaatgcacagcttacgccaaaggccacggaaggcatctgcggtagctcgcaatcgcctgccagccagttatttacccaggcaagcagcacactttgcgcctcttcccaggtttcctgactgaagcccggcagtggggagatctccccccacccttcgcgctcgccttcacgcaggcaaacatacagcccgtcgcgggtttttaaccgcctgtcgcgcagaaccacccccgcgtccatggggatctgccagcggtatacctgcgcgctacgcattacggattccgtttgaatttgctgaagtcaggctgacgtttctggttgaaggcgttgcgaccttcctgaccttcttccgtcatgtagaacagcatggtggcgttgcccgccagctcctgcagccccgcctgcccgtcacagtcggcgttcagtgcagctttcaggcagcgcagcgccatcgggctgttttgcagcatttcgcggcaccaacggacggtttctttttccagatccgccagcggtaccacggtgttcacaaggcccatatccagcgcctgttttgcgtcgtactgacggcacaggaaccagatttcacgcgcttttttctgcccgacgatgcgagccatgtaggaagcgccccagccgccgtcgaaggaaccgactttcgggccagtctgaccgaagatggcattatctgccgcgatagtcaggtcgcacatcatgtgcagaacgtgaccgccgccgatggagtagccagccaccatcgcgacaaccggtttcggacaggtacggatctgacgctggaagtccagcacattcaggtgatgtacgccggaatcatctttatagccgccgtaatcaccacgcactttctggtcaccaccggagcagaacgctttatcgcctgcaccagtcagaatgatcacgccgatgttgtcgtcataacgcgcatctgccagcgcctggatcatctcttttaccgtcagaggacggaaggcattgcgcacctgcggacgattaatggtgatttttgcgataccgtcggtggatttttcataacgaatgtcctcgaaaccttcggagcagtcgtgccattcaaccggtgcgtaaagcattgcttcatcaggataaatcatattgtgtcctttagtcagaaacgcaagatctgcgccagacttgcgattacgccagcgggattttcccgatgcgcgttatgtccggcgcgaggaatgacatggcagtcggcagccagttccgccgccagggcgcggaatttgctgtcacgttcaccacataaataataaaacgcaaatgtgcgggcgctaaggttagcacgtaaatcaggctggacggcgagagaagtcgcctccagcatggcggcaagcgttgcgccattattgttgctgcgcagcgccaccagctcccggcgttgatcgtcattgagactggcaaaaacaggctgttgataccagtcggcaaataccgccgttaacggttctgtgagaaaacgctgcacccattggcgatcggaacgctgacgttccgcacgttgttcagcattttgcagccccggatgcccgccttcgacaataaccccacaaagccccgccagcccctggcaagccgccatcatcgccacccgtccaccaaggctgtaccccaccagccagaagtcaaggatgttgtaactaaccaaggttttacgcagtaagtcggtgacatcatcaaatccatcgacgctaatcgccgcgctaccaccgtgacctgggagatcaacatacaaccgactgtagtcggcaaacgcctcgcccacttcttgccattcgtggcaatcgccggaaaaaccgtgcaaaaacaccagccagggtaaacctggttttccgtgttttgcctgcgcgtgcaggatcataaatggcttacctgcgccagaagttgctggagcgtttgcgcaccatcggtgtcgttaaccaccatttcaatcaccgtggtggttggcgtgcgccaggcgtcggcaaatgccgtttcaagttcctgccagttttgcggacgatgatatttcagctcgaacatcgcggcggcgtgctcaaaatggacgttttgcggcatcagatagaaacgctcacgctcgctttgcggcgttggcaacaggctgaaaatttgcccgccgttgttgttcaccacaattaataccagcggcgcagaaacctgacgcaataacgccagcgcgttgagatcgtaaagtgcggagagatcgcccacaatcgccagcgtcggtttgccgcttgcccgctgaacgccggcggcggtgctaagcagcccgtcgataccgctggccccacggttgctgtacaccgggtaacctgccggaagttggctaagcgcatcaatcagacgtaccaccaggctgttaccaacaaacaattgcccctgttcaggcagatagtcgcagatgcgatgcgccagttgcgcttcgccaaacgcatcacggcgggcaataaccgcctgcattgcctgttccgccaggcgcgggatttcaacgcaccagggctggcgtttttctgccggatgcagctccagccagtcggcaatattggcaattaagcgacgtccgcgatggtgtgccggatcaagtcgcccttcaatgtcatcaacaatccagtactcttctggttcacagcttgcctgccattgcaggagccgtttccccgtcaggctgcttcccagttgcaccacaatttgcgcctgctgcagctcgctggtcgctttggcattgcctaaccaaagatcggcacacggcagcggctgcccggtttgactcagcacatcgccaatcagcggccagccaagagtttgcgcccacagggcaacttttttgccctcttccgcactcatgcgcccggcaaccaccacgccgcgcttttgtcgccagaagaaccagtcgcgctgtttttcactttccagacgaggcgcttcacgcagccacggtttgtcgtcctgccaccagtcacccagacgctgttgccagctaagcccggtatcgtccatttcgccatacagcggttcagcaaacgggcagttgatatggactccccccgcatgaagcgtaccgagagcgtggtcgatggtagaaaccagccaacgtgcggggatatcctgggtcgggcgcggcaaactaatactgtgcgtggggtgagaggcgaacattcccggctggcgaattgcctgattcgcgccgcagtcaattagctccggcgggcgatcggcggttaagagaatcagtttttctccggttaacccggcttcaatcagtgccggatagagatttgccaccgccgtgccggaggtcacaatcaccgccaccggctgcttgctgactttcgccagccccagcgccagatgccccaacccacgctcatcgaaatgggtgtggtgaatgaatgcggaattctccgccgccgctaacgttaacggtgtagaacggctgcctggggcgatacagatgtgtctgacgccgtgacgcgttaatgcttccagaatgaccgccgcccagcgtcggttaaatgcgcttacactcatgagtttgtccggtatcaatattgcggctaagtataaggagctacaaaaatagattattgatatgaatcggtaatgatgcgactcattattattccatttgtaataaagtacgcagccctgccgctttgttgtcgatttcctgccactcttgctcggggtcggaaccacggacaatgcccgcgccagcatataatcgcacgacattgccgctaatttttgcactgcgcagggaaacgcagaattcgctttgttgtaaactgagatagcccgcagaaccggcgtaccattctcgggtgaacggttcgtgacgggcgataaactgtcgcgccagatcgcgcggtaagccagcaactgctgccgttggctgcaactgatgtaaacagatcacatcatccgctttgttgagactagtccagatacagcggcgaagatgctgcactttacgcagacgcagtacctgcggcggtaaaacatccagcgtctgggtatcggcctgtaatcgttgacagatatcttccaccaccagcatgttctcgcgctggtttttatcatccgccatcagccactctcctaactgctgcgcctgcttatcatcaggattatttgctactgttcccgccagcgcttcagtacgcagcgctttgtcacgccgccgccataaccgttccggactagagccaagaaaagcattttcgccatcaaaggccatgtaaaaatggtagcaattcagattcagtcgacgactggcagccatcatcgccgccgcgttgaccggacttgcgaaatgcaggtcagttgcccgagcgagcaccactttgtcgagctcaccttcggcgatggttttcgttgccagttcgattaattgcgtccagcccgttttgtccggccagtgttgttctcgcgtggtggttaaatgtaacccaggcaagggcttgatactcaccagtgtggcgataaattcttttgcctgaatcgcatcgtgctgaagggagctttcgctgaatagcgtcagccgcagcgtggctttaccgccacagcgtcgccattccaggcggggtaaaagtaaattgccctggctcgggtcaaaagcattcagcccccaaatgcgtaagtcggcgtgttccgggtgctggcgaagaaaacgttgtgcctggtccaagctcgtaaaacgggtaatcgcgcccaggacgacagcttcttcatcaccattacgttgttgccagtagaattgcgggtatgtttgctgactggccagccagctcaaggcatcaaaagcgtctttgagagggaaaggaatatcgataacccgaatgccgggtgtcgccggaatctcttggctcaaatggcgcagtagattttccagcgccgtagtaagactttgcacgcggacctctccctgttaaaagcctcacattatacggggtactacaaaaaaaatgcagtaccccggtgtagggaggttttaacggcgtgccagcaacagtcctagtaccagcccaacggccgcgcccacaccaattccttgccagggtttttcgtggacgtagtcatcagcacgataaactgcctgcttcgcccgatagtaataactgtcactagcctggctaacccgttttttcacatcatccagcgctttttctgcacgcgctttcagctcaacatatttctgatcggcgggatcgccagaggagcggagcacctcttccagtgtttcactaagcagcgtcaggtcgtcatcgatacgtgtatcaccaaactgattagacattctcgttctccatttgcgtaaaacctgtcactaactatagacaagggttgttgattacgcctgaattacctcgcgtgccatcccaatgtgtgggataccatcttcttcatagacctccgtcacagggataaaaccgaaactctggtagaagttttgcagatgcgcctgcgccccgaggtaaacaggcttatcaggccagtgatgcgtacatgtttcgagtgttttactcatcagctgctgccccactttttcgccacgcaacgcttcactgacaatcacccgacctataacgaccggctcaagatcatcatcacttttcagaatcctcgcatacgccaccagttcatcatttttccaaccgagaatatggcgattatcccccgtcaaatcatcaccatcgatatcctgataagggcaattctgctcgacaacaaacaccgcgcaacgcagttgtaataaggcataaagctgggaaacgcttaattcagagtgatgcagatcttgccattcaatcataatgctctccttttagatgtatgccttatactagccggaatattttttgaaacgtgatgaactcatggaattaatttttttaggtactagtgccggtgtgccaacccgcacgcgcaatgtcacggcaatattgcttaacctgcaacatccgacccagagcggactttggttgtttgactgcggtgaaggcacccagcatcagctactgcataccgcctttaaccctggaaaactggacaagatttttatcagtcaccttcatggcgatcatctttttggtttacccggcttgctgtgcagtcgttctatgagtggcattatccaacccttaacgatttatggtccgcaaggtatccgtgaatttgtggaaaccgcgctgcggattagcggcagttggaccgattatccgctggaaattgtcgaaattggcgctggcgaaattctcgatgatggcctgcgcaaagtaaccgcttatccgctggaacacccactggaatgttatggctatcgtattgaagaacatgataaaccgggtgcattaaatgcccaggcattaaaagctgctggcgtgccgcctggcccactgtttcaggaattaaaagcgggcaaaacaatcacgctggaagatggaaggcagattaacggcgcagattacttagctgctccagtgccaggtaaagcgctcgctattttcggcgataccggcccctgcgatgccgcacttgacctggctaaaggtgtcgatgtcatggtgcacgaagcgacgctggatataaccatggaagccaaagccaatagtcgcggccatagctctacacgccaggctgcgacactagcccgtgaggctggagtcggcaagctaatcattacccacgtcagcagccgctatgatgacaaaggttgtcagcacctgttacgtgaatgcaggagtattttcccggcgactgaactggcgaatgatttcaccgtgtttaacgtttaactctgcttattattaaaaacagggcgaaacttgccctgttatcgcaacccgcgctacatatatccacccacacaggcatattgagcgatttttgatatttattcatctccttacgcactatattcagagcaataagttgcctcttttcatcttgattcagcacaacctttgcaactaaaaggagcccatgatggttacagttgtcagcaattattgtcaattatctcaaacgcaactcagtcagacatttgcagaaaaatttactgtgaccgaggaattactgcagtctttaaaaaaaacagcgttatccggagatgaagaaagcattgagttactgcataatattgcgttaggttatgataaatttgggaaagaagctgaagatattctttaccatattgttagaaccccaacaaatgagaccctaagcattatccgacttatcaaaaatgcttgtttaaaattatataatctggcacatatcgcaaccaactcccccctcaaaagtcatgatagtgatgatctcctgttcaaaaaactattctcccctagcaaattaatgacaattatcggtgatgaaattcctcttatatctgaaaaacagagccttagtaaggtgcttttaaatgatgagaataatgaactgagtgatggtacaaacttctgggataaaaatcgtcaattaaccacagatgaaatagcttgctatcttcagaagatcgccgctaatgcaaaaaatactcaagtcaattatcctactggtctctacgtcccctactccaccagaactcacctggaagacgctctcaatgaaaatattaagagcgatccaagttggccgaatgaagtccagttattccccataaatactggcggacactggatattagttagcctacagaaaatagtaaataaaaaaaataataaactacaaataaaatgcgtcatattcaacagtttgcgtgcactaggctatgataaagaaaatagtcttaagcgtgtcattaatagttttaattctgaactcatgggagaaatgagcaataataatataaaagttcatttaaatgaaccagagataatatttttacatgccgatcttcagcaatacttaagccaaagttgcggtgcatttgtgtgcatggcagcccaggaagtgattgaacaaagggaaagcaattctgacagcgccccctatacgttattaaaaaaccatgctgacagatttaaaaaatatagtgcagaagagcagtacgaaattgattttcaacatcgactggcaaacagaaattgttatttagataaatatggcgatgcaaatatcaatcattattatagaaacttagaaataaaacacagtcaacccaaaaatagagcatccggcaaaagagtgagttaacatcattgttaattaattcgaccagtcagcaaatatgctgactggtcgaacatagtttgctaaacagtcatcactgactgatgtcagtcacaccatccgccagttcaatcaggcgaataaattccgccctgtaaccctgtggatcttccccttttgcctgctgagcccactgtttgatctgctgccaggaggtattgttcaggtattcagaaccgcgtaacttttgcccatatgcagctactgctgcgcgaaaacgcatatcttcagagggcgcgtttattgttggccccagcgggaattcaactaactgactttcttttccctgcgggtatttccagcgaatttttaaccaggccagttctttcgttttgtcgcttttcgctaatttgttatccggggcatagcgtaacttatcaatacttgctttttgcccgttcagcgttaattcgaataacaacgttatatgtttgcctgcgcctatatcccctgcatcaacgttgtcgttattaaaatgttccacccgaagttggcgcttttcataaccaatctgacggtattccgttacccacgcggggttaaactcaatttgcgctttgacatcttttgctacggtaatcaacatctgccgcatttcactattcaatactttctgcgcttcagagagggtatcaatgtagctgtagttgccgttaccaacatcggcaattcgcaccatcattgcctcgttgtaattgctattccccacgccaaacgtgctcagagtaacaccagactcccgctgttttttgaccatactttcaatgctttttggatcgtcaatgccaacgttaaagtcaccgtcagtggctaataaaatgcgattgatgccgcccttaataaaccccttcgtcgcctgctgataagccagttccagcccggcaccgccattggtactgccttcggcatccaggctatcaattgcggcattaatttccgccttatgactcccggagatagaaggcaatgcaatacgggagtcgccagcgtaggtcacgatggcaatgttatcctgctcacgaagttctttgaccaataatttcaagctagactggataagtggcaaacgttcatcagaaatcatactaccagaagtgtcgataagaaagaccagattagaagctggtaactcttcacttttgcgatctttcgccaggatatcaactttcagcaatgttcgctgttcattccatggtgcaggtgccaattcgtagcgcatagcgaaaggtattggcttagaggccggaatagattgtttgtctttgatatcccaatcagacgggaaataattgactatctcctccacccgcacagcgtctggcggaggtaacagcccttgattgaggaaacgccttacattcgcataactgccagtgtcaacgtcaagactaaacgtcgccaacggattttgcgctacctgcttaaccggattatcatcgaactgctggtagcgagcggttcctggatttgcgatatgtgtagcttttgctttagccgctcttgcaaatgttggcgcttcctgcaatcgcccctgtaaagcctgtttgtcactatattgttgcacttcttgctgggccaaggctttcgcggcggcggcgctttgctcagcctcttttattgcagcttgctgcgcggcaagcacttgctgctctgtgggagtactgggttgttgttgctgactttccttattctcaggttgcggcccacatccactcaaaatcaaactactcataagcaacatgattatatttttatttcgcatataaaatccttttaaataaactcaggcaccagacataaaatatactctttgtataatcctgctaatcttaataaaatacaatatcgaaacccatagcaaataatgattcaacaacgcaacccattaataatttgcatatgaaaaaaataatctttgcttttattatattatttgtgtttttactccctatgattattttttaccaaccctgggtcaatgcattaccgagtacgccccgacacgcaagtcctgagcaattagaaaaaacagttcgttatcttacacaaactgtgcatccacgtagtgccgacaatattgataatctgaataggtccgcagaatatataaaagaggtctttgtcagtagcggtgccagagttaccagccaggacgtccccattacgggtggcccctacaaaaacattgttgctgattatggtcctgccgatggaccgctgattattattggtgcgcattatgactctgccagcagttatgaaaacgatcaattgacctatacgccgggcgcggatgataacgccagcggtgtggcaggattactcgaactggcacgtttgttacatcagcaagtaccgaaaacaggcgtgcagctggtcgcctatgcgagcgaagaaccgcccttctttcgtagcgatgaaatggggagcgcggtgcatgcagctagccttgagcgtccagtgaaattaatgatagcactggagatgattggctattacgactctgcgcctggaagccagaattacccttacccggcaatgtcctggctttatcccgatcggggagactttattgccgtggtcggcagaatacaggatatcaacgccgttcgtcaggtaaaagcggcattgttgagttctcaggatttatctgtttattctatgaataccccagggtttattcccggtattgatttctctgaccacctgaattattggcaacacgatattcccgccataatgattactgacaccgctttttatcgtaataaacaataccacttgcccggtgataccgcagacagattgaattatcagaaaatggctcaggtagtggatggtgttataactttgttatacaacagtaaataataaaaatttctcgaggcgggtccagaaaaagcgacatgcacattttattttccctcatctgttttaagatgcgaaacatgaaattcaacggaggaaaaataaatgggaatgattggctattttgcagaaattgacagtgaaaagattaaccaactgcttgagtctactgaaaaacctttgatggataatatacatgacacgcttagtggattacgccgactggatattgataaacgctgggattttttacactttgggctgacaggcacctctgcttttgatcccgcgaagaatgatccgctgagtcgtgccgtgcttggtgaacacagcctcgaagatggcatagatggcttccttggattgacctggaatcaggagttagccgcgacaatcgaccgactggaaagtctggatcgaaatgaactgcgtaaacagttttccattaagcgactcaatgaaatggagatttatccgggagtgacctttagtgaagagttagaggggcaactctttgccagcatcatgcttgatatggaaaagctgattagcgcgtatcgacgtatgctgcgacaagggaatcatgcgctgacggttattgttgggtgatatagcttgatgcctgggggagaaagacccattagttaagatttacgccaggatcatcttgaaaaaatctttaaccatggtccggtttttatccccttgtataaatattactaaatgcttgcttagtcgcattgttaaatgcaataccgtatattcggtatgtaacagcgatatcctctgtgctggcaacgatctgtcatgcttgatgaaaacggaattgaacctgtcattaccaggtagataaaaagcctgttcaattttgggattattttttataactcgtgtctgttatggcgacacgggaaaacatcaatattgtccttcacaaattgcagtaatatagaatcaacctctcttgcaagttggtcacaatgtattataagcattttgaatatgtcatcctctgtaatctcgtgaaaattttcggccttgtcttttagctcatcatatcggattcttgcagtaaccattttttgggcgagttctaataaccccaaagcttgcaattgctggtgagtatgatcactttcaaaaaatatcccacactccattccttcccaaccaacatattcatgccattcataaaccagcataaatgtttgtaaaactggcggtaataattggatatctgcaaaaccaaaccaaaacttacgcttgagatcccactcatattcaatcgccaatgctatattgtttaaggcatctccggcatccttatttttacgcaaaatcaattccgtcagtgtatagcgttgttcatcaatacgccgaagagcttctgcaatatcatagtttgtagccaacaaaacattctctgcttcctgatgagtgacgtctgcttttgccgtcaatatattgatttggtcaatatgaaacaacttgatggcttcatcaacatcaccgccagtcctctctaacaaacgtctggcaacctggataccgacaggtacgttcttccgaagtttacgaatttcacttaaccattccatgtcaaacccctttaaatatttatgatattaaatataacaacgtctggataacgacccggcctgactgaatatctcacgttttcctgcttaacattcatgttatgatgctcttgaaactaataatacgtatggaattgtcactatttatctgctaatgaatagtaacaatgtcattcgtttgatgaatatattatttcagggaataattatgacacctttagaacgcattacccaacttgttaatatcaatggtgatgttaataatcctgatactcctcgtccattgttatctcttgaggatttttttattgacaataatatccatggtagtatatgttgcaatgtgattccagaacaatctccgcaagctatctatcaccattttctgaaaatacgtgagcgtaacaatgttagtgatgttttggtagaaattacgatgttcgatgacccagactggccctttagtgaaagtattttagttatcaccactgctagtccagaagaagttcagagctggtttgtagaagaaattgcccctgatgagtgctgggaaggatggagtgaagatacggagcatggatgggttgaagtccctgtgggtatgcatccggttacttgttggtgggattaaaacatttatataaacagataagcggatgtttacataaatttttatgtgaaggaacatgatgaaacttattcctcgcagtagtgatattagtcctggcattgatggaatttgcccggggccttttcctccgaacggatttaccgtacttacagatgcagcatatggtaacggagactgtttcggtttgtactggcctattggtcaggagcataaactacctatagtgtgcgaaacgtaccatgacgaatggcgaatcgtacctgccttttccagcattaagaagttcgaagaatggctggaagtgaatgatgatgatccccatgaaaatggcatcagcatcgaagatcaagactttgcagcaaatctcttccgtgttgctcggaaatgtcttagtacgggaaggcttgatgacgcactgccactgttacagcgagcaacagaacaattgcctgaagtcagcgaatattggttagcactggcaatccagtatcgccgatgtaaaaaaacagaagctgcagcacaggctgcgcttaatgcttatcttggcaattgggcatttggtgttcctgacaataaagtcattcatttgctgagtcaggccgcagatgtcccgaatttccaggatgatcctgtgattcagtgcattaaagaacaaggattagatcttagctttggaggaacaaaggaaaataataattaccccttgatgcagatgtgtgttgatacttattttgcgcagagaaaaccgcttcaggcattaaccctgttacataattatgcctggataatgtccagtgaaacgactgcatttcaggaacgctatgattttaatatcgatgaatggcgggcaaaattcaggcagttatgtttagagtattttggcgatagtcgtacacagttcacttaacgctctgcgtctatctactatcccttctttttcagaaaaaccgccgagcatgtcggcggctttctgacttacaaagtaacagattacatcagcggcattgccaaacgcacaatgctaatcagcggttgtggccatacacccagcaccagtaccaacagtgcagagatcagcacaacgataccgcccgcgctgtactgccagttacttggtgcatcgcgacccggttgttccggggcgtgaagatacaggctcaccgccacgcgcaggtagtagtagaggccgattgcgctaccgacaaccacggcacccaccagccaccacaagtgtgcctggacaccgaccgccagcacgtagaacttaccgataaagcccagcgtcatcgggataccggccagagacagcatcatcaccgtcatcactgccgcgaggatcggacgatgccagaacagaccgcggtaagagaacagggaatcagcatccgggccacgatacgggctggacatcaggctgaccacgccgaacgcgccgaggctgctgaacagataaccggccaggtaaacccctaccgcttccatgctcatctcgccggtttgcagcgcaatcagcgctaccagcagatagccgaggtgagagatagaactgtaaccgagcagacgtttgatattggtctggctcagcgccatcaggttaccgaagatgatggaggcaaaggcgataatcgccagcaccacgcgaatcgcttcgctgtcacccaccggtgcgtagaggaacagacgcatcaccacaccgaagatagcgattttgctcgccgtcgccaggaaagtggaaaccggcgcaggcgcgccctggtatacgtctggcgtccacaggtggaacggcaccagagagagtttgaagccgaggccaacaatcatcaggccgaaacctgccagcaacagcggctcgttgagcataccgtcgccaaggtttttacccaacgcgacaaagctcaggtcgccagactgcgcatacaccagcgccataccaaacagcaggaaagaagacgctgcggcagaaaggatggtgtatttgatactggcttccagactacgtttctggcggaaagcgtaaccgaccaggccaaacagcggcaaagagatcagttcgataccgaggaacagagacgccagatggttggcattcgccagcaggatcccgcccagcgcggcaattaacaccaacaggtagaactcatccttgttgtcgttatagccttcaagccacgggtaggcgaaagtacaggtggcgaggctcgccaacaataccagcccggtgtaaagcatggcgaaaccatcaacgcgcatcagcggcgtaacgtccatagcgcccgcctggccaacaaaccagagcgaaaccagcgccgcgttaagcccaataaccgagagcgtagcgttgaggaaatgattgcgtcgccacgcaatggagagcatcacaaccaccaccgtcaagccgacgatcagcaacggtagcagtgcgatcaggttttgtggagttattgtcatggcgatttacggccttgtagtagtaacggaattaacaaaccactgctggatattgccaatcgcggagtggctggtatccagaatcggctgcggatagaagcccagcagtaccagcagcaccaccagcaacaggatcataaacagctcacgcaggctcatccctggcagttcctggctggcaatctggcttttcgctttaccgaagtaagcgcgatgtaacatcgccaggctataaacagatgcaaagaccagcccaaaggtagagataacggtaatcaccggtacaacctggaagctgccgaacagaatcataaattcgccgacgaagttaccggtgccaggcatcccaagcgttgccaccgcaaagaacaggctcagtgctggcagccatttcatcttgctccacagaccgcccatcatgcgcatgtcgcgggtatggatacgttcataaagctgaccacaaagaataaacagacccgccgcgctcaaaccgtgcgcaatcatctggattaccgcgccctggtaggccaactggctgccggtgtagatagcaatcagcacgaagcccatgtgggaaacgctggtgtaggcgatcagacgtttgatatcggtctgggcgaaggccatccacgcaccgtagaagatgccgataacacccagccacatagcaattggcgcgaactctgcgctcgcgttcgggaacagcggcagggagaaacgcagcaaaccgtaagcggcagttttcagcaagatccccgcgaggtcaacggaaccggcggtcggagcctgggagtgcgcatccggcagccagccatgcagcggaaccaccggcattttgactgcgaaggcgatgaagaagcccagcattaacaggtattccacaccactggacattggcgtattcagcagctcttcatagttgaaggtccagacgccggtcgcattgtagtgaacaaaaaccagcgccaggatggcaatcaacatcaccaggccactcgcctgggtgtaaatgaagaacttggttgccgccgtgatacgcgttttaccgtcagaggctttatgcccccacagtgcgatcaggaagtacatcggcaccagcatcatttcccagaagaagaagaacaggaacatgtcgatggcaaggaacacgccgataacgccgcccaggatccacatcaggttgaggtggaagaagccctgatatttttcgatctctttccagctacatagtaccgccagcacaccgagcagaccggtcagcacgaccatcagcaggctcagcccgtcaatggcgagatgaatagagataccaaaacgcgggatccacggcatgtcgaattcagactgccactgcggaattccggcggattgcgtcagactataaccgccctgcaaccacagttgcaggctcagcgccagcgtcaatcccatggtgatcagcgcgatccagcgtggcaccttgacgccaaagcgttcggtctgccagcacaggaagccgccaataaagggaattaatattagccagggtagtaacatggcgatctttattccttgtaaaagtcccgtcaggaccggattttcaacgaattctcacgacagaaaattctcttcggactgggggtagtgtcggatgcaccgcgaaggcggcttatccgacctacgttcttatatgcccaggggcaatcccacaatccttaactcaacgcagtaccatcaacagtgccagcaccacgaccgcaccgatgctcatggatgccacataccagcgcagatagccgttctcacttaacagcagacctttacctgcaaagcgggaaaggacagccgggatgttcatcatactgttcagcggatcgcgtttcagcaaccaggcaatacccaggaacggcttgacgaacactttgtcatacagccagtcaaatccccaggcgttgtaccaccaggtgcccagcagacggcccggcgcactgttggcgatggaggtcaccagagtacgtttacccagccacagccaggctgccagcagaatgccgaccaccgcgaccacgccagaggtaatttccagggtcaacatgctgccgtgcgccagttccgtcgtttgcggaagcacgccctgcagcggcggtacaatcagtgcgccaacgaaggtggaaaggatcagcagcacaatcagcggcaggctgtgagttacccctttcacggcgtgagcgtgaatttgttcttttccgtggaagacgatgaaaatcatacggaaggtgtagaggctggtcataaacgcaccgaccagacctgccaccatcagattgatatgaccattcgccatcgcacccgcgaggatctcatccttactgaagaagcccgcagtgaccagcggtagtgcgctcagtgctgcgccgcccaccaggaagcagagataaaccagcggaatagatttacgcagaccgcccatcttgaagatgttctgttcgtgatggcaggccagaatgacggaaccggatgccaggaacagcagcgctttaaagaacgcgtgggtcatcaagtggaaaatcgccgcatcccatgcctgcacgccaagcgcgaggaacatgtagccaatctggctcatggtagagtaagcgagaacacgtttgatgtcggtctgtaccagcgcggcaaaaccggccagcagcagcgtaaccgccccgacaatacccaccagatgcagaacttccggcgtcatcaggaacaggccgtgggtacgggcgatcaggtagacacccgcggttaccatggttgcggcgtggatcagcgcggagacaggcgtcgggcccgccatcgcgtcggcaagccatgtctgcaacggcaactgcgcagatttaccgaccgcaccgcccagcagcatcagcgtcgcccacatcagcatgttattgccgtcagcaaagtgcgctggtgccagttccaccatttcgcggaagttcagggtgcccagttcgttgtaaagaatgaacagtgcgaaagcgaggaacacgtcacccacacgggtcacgacgaacgctttcattgccgctgcgccattcttcggatcggtgtaatagaacccgatcagcagataggagcacaggcccacgccttcccagccgaggtacatcagcagcaggttgtcggcaagcaccagaaccaccatgctggcgatgaacaggttggtgtaagcgaagaagcgagagtagccctcttcaccgcgcatataccaggaggcgtacatgtgaataaggaaacccacaccagtgaccacgctgagcatggtcaggctcaggccgtccagcaccaggttaaaaccgatgttaaagtcgcctacgctcatccacgtccacagcggctggctgtatgtctgctcgccgttagcgaagaaatcaacgccgataaaggcggttaccagcgccgccaggcccacagagcctacgccgacgatcgcgctgacgttttcagaccagcgcccacgggagaatgccagcaggacgaagccaatcaatggcaaaataatggttaaggcaagcatgttcatccgcgcatctcacttacactatcgatgttcaggttctggcgacgacggtgaagttgcagcagcagcgcaaggccgatactcgcttctgccgccgcgaggctgatggcgagaatgtacatcacctgaccgtcggtctggccccagtagcttccggcgaccacgaaggccagcgcggaggcgttaatcatgatttccagaccaatcaacataaacagcagattgcgacggataaccagaccggttaagccaagaacgaataagattgccgcgaggatcagtccatgttgtaaggggatcatgcgtgctcctccgtttttcttttcgcgctgtcgtctttacgattgctcagcacttcacccgcacgctcttcacgaccgacgtggaaggccacaaccagacctgcgagcagcagcatagaagccagttccaccgccagtacgtaaggcccgaacagcgtaatacccactgctttagcactgattggcgtaccgtcgataccctgatcgttaacaccgaggatggcgtaaacaatcaccaccagcatgatggcgctcaaaattgccggaccaatccacacctgcggtttcagccactggcgttcctgttcgatttcactaccgcccaggttgagcatcatcaccacgaacacgaacagcaccataatggcacccgcgtagacgataatttccagcgcaccggcgaagtaagcgcccagactgaagaacaccccggaaatcgccagcaggctaataatcaggtacagcagtgcgtgtaccggattggtatgggtgatcactcgcaaggtcgcaagtatggctatcaggccacagatataaaaagcgaactccattgcccctctccttacggtaacaggctcttgacgtcgataggcttggcttcgttctctgcttcgcccttatctttgccgtcgattgccatacctgccatccggtagaagttatattccgggtatttgcccggaccggagatcagcagatcctctttctcgtaaaccagatcctggcgcttgtattcccccatttcgaaatccggggttaactgaatcgccgtggtcggacaggcttcttcgcacagaccacagaaaatgcagcgactgaagttgatgcggaaaaattccgggtaccagcgaccgtctttggtttctgctttttgcaggctgatacagccgaccgggcaggctaccgcgcagaggttacaggctacgcaacgctcttcgccgtccgggtcgcgggtcagaacgatacgaccacgataacggggcggcagatagaccggctcttccgggtacattcgcgtttcgcgtttggcgaacgcgtgcaggccgatcatccagatactacgaacctgggtgccgaaacctactaacaattcttttaaggtcatggtcttattgccccttattgcgcctgccagagaatgacagccgccgttaccagcaagttgatcagcgtcagcggcaggcagattttccagccgaaggacattacctggtcataacgcggacgcggtaagctcgcacgaatcaaaatgaacatcatcataaagaacgcggttttcagcgcgaaccagatgaatggcggtaacaacgggccttgccagccaccgaagaacagcgtcaccatcaatgcagagatggtcacaatcccgatgtactcacccacgaagaacagaccgaacttcataccggaatattcaatgtggtaaccatccgccagttcctgctcggcttccggctggtcaaacgggtgacggtgacataccgccacgcccgcgatggcaaaggtaataaaaccaaagaattgcgggataacgttccacacatgcgcctggctgttgacgatgtcggtcatgttgaaactaccggcctgcgccaccacgcccatcaaggaaagcccgaggaacacttcgtagctcagggtctgcgcagaagcacgcatcgcacccagcaagctgtatttgttgttactactccagcccgcaaacagcaccgcgtaaaccgccagacctgccatcatcaggaagaacaaaatcccgatgttcaggtcggcaaccacccaacccggactgactggcacaatcgcaaaggccagcagcaggctggtaaaggcaatcatcggtgccagggtaaagatgacgcgatcgctgaatttcgggatccagtcttctttaaagaacattttgatcatgtccgcaaccagctggaggctaccgccccagccaacacggttaggtccgtaacggttctggaacagacccagcaggcgacgttcgccaaagctcatgaatgccccgcaggtgacaaccaccagcaggatcaccaccgctttgaggatggtcagcaggatctcaatcagttccggacttatccaactcattgttgtgcctccttgagatcctcaagatgcgcgccagccagcaccggagcaatgccggacatacccatcggcaagcccacctgccctgccgtcagtccttcggcgatttcaaccggcagcgtgaccgtgttgccatcgtaactaaaggagacgcgtgtacctgcgttcacacccaacttcgcggcatccgctgggttgagtttgatgtacggctgcggcatacggctctggaagaccggagcacgctgactcaattcatcgctgccaaacaggtggtaatacggcgcgatacgccatttcccgtcctgcggctggaagcgtgccggtacgctggtgaagtaatccagaccattttcgctggtttcaaacagacgcacgcccggatcgccaaagcgcagtttgccgcccacttcgtcctggaatttgttccacgcctgcggggagttccagcccggcgcccaggcaaacggcacttggctacggtgcgcagtcggctggttgttaccttccatgctgaaggtgaacatggtgtcaatatcctgcggctgacgcggctcatgaacgctgatattggcgcgcatggcggtacgaccgctgtaacggtgcggttcacgggccagtttctgcccacgaatacggaatgtcgcatccggcgcagcatctttgatacctgccagttccgggattttcgccacaacagcgtcaatcacatggtcgagctgcgtccagtccacttcacggctcagcagggtgctgtgcaggctgtgtaaccagcgccagctttccagcatgacagttttgctgtcgtaataagcaggatcgtaaacctggaagaaacgttgggcgcggccttcgttgttgatcaccgtaccgtcgctttcagcaaagctggcagcagaaagtaccagatgggcgttttccataatcgctgtgcgttgatgatcaaccaccatcaccagcggtgctttagccagcgcagcattcacgcggatagcagaagcgtgacgatgcagatcgttttccaacaccaccaccgcgtcggcgcgtccggtttccagttcggttaacgcttcttcaaggctaccgccacccataatgcccagccccatgctgttgacggaacgggcaatcatggtgataccgacgtcagcgccgcgacctttcagggctttcgcgacgttagccgccgcctgaatcacctctaagctaccggcgttcgtcccggagataatcaacggtttcttcgcacctgccagtgcctgcacgatgacgtcgattttgctttgcagctcaggttcgataccgtcaaccgctggtgcagagttatccagcgcatgggcgatggcaaaacctaaacgcgcctgatcttcaaccggtgcgcggtaagtccacgccgcgatatcatccagacgggtgtcatcaacgttggtaacaaacagcggatgcttcgcacgttgaccgatgttgaggattgccgcaatctgccagtcagccactttctgtgctgccgccatttcgcgcgctttacctttcacagcctgacgcactgccagcgcgacgcgcgcgccggtctgggtaacgtcttcgcccagcaccagtaccgcatcgtaagattcgatttcgcgcagagccggagtataaatgccgccttcacgcagcactttcagcgccagttgcagacgttcctgctcaccgtgagcgataccggtgtagaagttttcttcgcccaccagttcacgcagcgcaaagttgctttccacgctggcacgcggagaaccaataccgatcactttcttgctctgacgcagaatatctgccgcgccctgcattgcctgttcggcgttgagggtaatgaaatcatcgccacgacgctgtactggctgacgcggacgatccttcaggttgacgtaaccgtaaccgaaacgaccacggtcgcagaggaagtagtggtttaccgtaccgttgtaacggttttcgatacgacgcagttcgccgtaacgttcaccggggctgatgttacagccgatggaacattgctggcagatgctcggcgcaaactgcatatcccatttacggttgtaacgctcggagtgcgttttgtcggtaaatacgccggtcgggcaaatttcgaccaggttaccggaaaattcgctttccagcgtgccgtcttccgggcgaccgaagtagacgttgtcgtgcgcaccgtaaacgcccagatctgtaccgtcagcgtaatctttgtagtaacgcacacagcggtagcaggcgatgcagcggttcatttcgtgagagatgaatggccccaaatcctgattacggtgggtacgtttggtgaaacggtagcgacggaagctgtgtccggtcatcacagtcatatcctgaagatggcagttaccgccctcttcacataccggacagtcgtgcgggtggttggtcatcaaccactcgaccacgctttcacggaactgtttcgcttcttcgtcgtcaatggaaataaaggtgccatcggaagccggtgtcatacaggacatcaccaggcgaccacgcgtgtcttccgcgttttggtattgcttcaccgcacactggcggcaagcaccgacacttcccagcgccggatgccagcaaaagtaaggaatatcaaggcccagagacagacaagcttccagcaggttgtccgctccgttgacctcgtattctttgccgtctacatgaattgtagccattagcatgcttccagttttctcagtcagagactgagcgttaatcgaaattcggttaccagcgctctttcagcaggttcggctgaatcccattaatcaaatgggtattgctgaacggctgtttgattcccgcctcaaattcttcgcggaaatatttgatggcgctctgtaacggctccactgcaccaggtgcgtgggcacagaaagttttacccgggcctaagaatcgacacagttgctcaagtgtttcgatatcgcccggctgaccttcaccacgctccagcgcacgcagaattttcacgctccacggcagaccgtcgcggcacggcgtacaccagccgcaggactcacgggcgaaaaactcttccaggttacgcaccaggctcaccatgttgatctcatggtcaaccgccatcgccagcgccgtacccagacggctgcccgctttaccgatactttcgaattccatcggcagatcaaggtgcgcttcggtcaggaagtcagtccccgcgccgcctggctgccaggctttaaatttcagaccatcacgcataccaccggcgtaatcttcgaggatctcgcgtgcggtggtgccgaacggcagttcccacagtcccggatttttcacccgaccggagaagcccatcagcttggtgccagcatctttacttttgctgatgttctgataccactccacgccgttagcgaggatcgccggaacgttacacagggtttcgacgttgttgacacaggtcggtttaccccatgcgccggaggttgccgggaagggtggcttgctgcgtgggttagcacgacgtccttccagggagttgattaacgctgtttcttccccgcagatgtagcgccctgccccggtatggacgaacagttcgaaatcgaaacctgttcccataatgtttttgccaagcagacccgcttcggtggcttcggcaatggcacggcgcagattaactgccgcttcgatatattcgccacgcaggaagatgtagccacggtaagctttcagcgcaaacgcggagatgagcataccttccaccagcaggtgcggcagttgctccatcaacaggcggtctttataggtgcccggctccatttcatcggcattacacagcaggtaacggatgttcatggattcgtctttcggcatcaggctccatttcaggccagtgctgaagcccgcgccgccgcgccctttcagaccagcgtcttttacctgattaacgatttcgtccggagacagcccggtcagcgccttacgcgcgccttcgtaaccgtttttgctgcggtattcgtccagccacactggctgtttgtcatcgcgcagacgccaggtcagcggatgcgtttcgggagtacggataatgtttttcatttataccgctccagcagttcagggatcgcttccggggtcagatgcgcgtgagtgtcctcatcgatcatcatgtttggccctttatcacagttccccaggcagcaagttggcagcagcgtaaagcggccatcaaatgtcgtttgccctggtttgatgttcagctttttctcgagcgccgcctgaataccctgataaccgttgatatgacagaccacgctgtcacaataacggatcacatggcgaccaaccggctggcggaagatctgactgtagaacgttgccacaccttcgacgtcgcttgccggaatacccagcacatcggcgatcgcgtggatcgcaccatccggcacccagccacgctgcttctgaacgattttcagcgcttcaatggacgccgcacgcgggtcttcgtagtggtgcatctcgtgctcgatcgcttcacgctctgccgcactcagctcaaaagcctcggtttgtggttgttgattctcgtgcataattagcggtccacatcactcataacaaaatcgatactgcccagataaacaatcaggtcagacaccaggctgccgcggatcgccgccggaatttgctgcaaatgcgcaaagctcggggtacgaacacgggtgcggtaactcatggtgctgccgtcgctggtcaggtagtaactgttgatccctttggtcgcctcaatcatctggaaagattcattggcaggcatcaccggaccccagctcacttgcaggaagtgggtgatcagggtttcgatatgttgcagcgtgcgctctttcggcggcggcgtggtcagcgggtgatccgctttgaacgggccttccggcatgttgttgaggcactgctcaagaatgcgcagactctggcgcagctcttccactttaagcattacgcgggtgtagcagtcagaaacgccaccacccaccgggatttcaaagtcgaagttttcatagccagaataaggacgcgccttacgcacgtcgaagtcgatcccggtagcacgcaggcccgcgccagtggtgccccactccagcgcctctttcgcgccataggcggcaacgccctgggaacgacctttcagaatggtgttttgcagcgccgctttctcgtaagacgccagacgtttcggcatccagtcgaggaactcacgcagcaggcgatcccagccgcgcggcaggtcgtgcgctacgccgccaatacggaaccacgccgggtgcatacggaaaccagtgattgcttccaccagatcgtaaattttctgacgatcggtaaaggcgaagaacactggcgtcattgcgccgacgtcctgaataaaggtgctgatatacagcaggtgactgttgatgcggaacagttcggagagcataacgcgaatgacgttaacgcgatccggcacggtgatcccggccagtttctctaccgccagcacgtaaggcatttcgttaacgcagccgccgaggtattcgatacggtcagtatacggaatgtagctgtgccaggactggcgttcgcccattttctccgcaccacggtggtggtaaccgatgtctggtacgcagtcgacaatctcttcgccatcgagttgcaaaacgatacggaaagccccgtgcgcgctcgggtggttcggaccgaggttgaggaacatgaagtcctcgttttcggtgccgcgcttcatcccccactcttccggtttgaaggtcagggcttccatctccagatcctgtttggctttggtcagctcaaacgggctgaattcggtagcgcgcgccggataatctttacgcagcgggtgacctttccaggtttgcggcatcatgatgcgtcgcaggttcgggtgaccgtcgaaagtaatgccaaacagatcccaggtttcacgctcataccagttagcgttcgggaacagtttggtgaaggtcggtacgtgcaggtcgttttctgccagcgccaccttcagcatgatgtcgcggttacgatcgatagaaatcagatggtagaaaacggaaaaatccgcggcaggtaacccttcgcggtgtgtgcgcagacgttcgtccatgccgtgtaagtcaaacagcatgacgtaaggtttcggcagtttctttaagaaatcgccaacttccagtaattgttcacgcttgatccacacaacgggaaccccggtgcgagtcgcctgaacagtaaaggcatccggcccaaaacggttgcgcagttcgccaatcaccggatcatcaagatgatcgcgggtctgccaggcgggttcttgcgcggttaagtcggtcatattgttcaccattgcaaatggtccgtggtgactgtcggcgcagtaagcttcgcgaaatagatttaggaataagcgaagaaaaatccctttgccgacaggcgcaaattaaatctcgtcaggtgtacgcaggttagttacggcaatgcgttcaccgcgcttgcgttcgcgctcactttgcatattggcgcgataaacgccctgatcgccaaccacccaggagagcggacgacgttctttgccgatagattcctgcaacagcatcagtgcctgcatgtacgcttcaggacgcggcgggcagcccgggatatacacatcaaccgggatgaatttatcgacgccctgcacaacggaataaatatcgtacataccaccagagttggcacaggcacccatactgataacccattttggttccagcatctggtcatacagacgctgaataaccggtgccattttggtaaagcaggttcctgcaaccaccatcaggtcagcctgacgcgggctagcacgcaatacttctgcgccaaaacgcgccacgtcatgcaccgcggtaaagctagtcaccatctcaacgtaacagcaggaaagaccgaagttatacggccaaatactgtttttacgaccccagttaaccatgtcattgagcttgcccataaacacgtttttgttaacttcttgctccagagggtcggttacgatctcctgcttttgcagggggtaacggtcgttctcaccgttgggatctatgcgggtgagcgtataatccatcttaatgcctcgcggttagcgttgacgattagcgatactgttcgtttccgggttcatacgctcgcggcgactacgcgcgggcgtccagtccagcgcgccaatacgcaccagataaaccagacctgccagtaacacaaaaataaaaattgcagcttccacaaagcctacccagccgctttcgcggatagaggtactccatgcgaacagatacagcgcttcaacgtcgaagataacgaagaacatggccaccagataaaacttggcggacaggcgtaagcgggcggagccgacgctgtcgataccggattcaaacggcacgtttttgctcctcgcgcgtgcgcgaccgcctaaaaaccaaccgcctaccagcatcaggcaacacaggccaatggcaacgataagaaagatagcgaatgcccagtgatgagcgatgacttcagtggatgtactcatactcattgcttactcatcaaaagtagcgccagattcactgctcttcacggcagatggacgccacatcgattcatggggaggaataaaaaaaaccttacaatcactgtagaaattcttttatacagctaattgatgtggttttttactcctttctataaccttttgtcaactttaacaaaagtttcttcacattagtttacataatatcaacaccattagcatttaatgccctttcaccccagatccttgacgactccaggataattagatgttgttgaatcgtgtccgttgtgaagcaatggaaaaaatacgggtctattttgacaggaatttgtgtcgattcctccccccaaaagagagtattttcttgatctgtgacacgcttttgtcattccataacaaaaacgcagcaacaaatttacgtattttttaacatcattgtagcaggtgatttttttcaggcgattatttgtgcgttcgggacgtgaatctctggtggttgaaaaatgaacagttttgtacgttctgcactatgcgatgaaggatttttactaaaaaaaagccgctggggtttaaaacacccccagcggctcgttttttacactattgtctcaggaattatctatcgtccgtcgattactcgatatccctttcaatcaacaaactatcatccccttccggagcagacattgggctgtattgccacggattatggtagctctccatcgcctgatagatcacctgggccagctcattattactggacggatcatagcacagcaaatattcggtatcaggtagcggcggtaagccatctactccactcagcacacgcaggtccgggctcatcatctcaaccggccttgccgtcacgccaagaccggctttcactgccgcacgaacggccggaagcgtgctggcgacataagccagtcgccatggaatatctgctttattaagcgtcgccagcaccatatcgcgaaacgggctaggatcatccagcaatacaagagggatcggctcgcctttttgcaatatgtattccgctgcgcagtaccagtgtgttgggctggtacgcaggttcaatgccttaaacgcactaggacgatgggtggttaccatcaaatccacttcctgggattccagcatttctgccatataggcattacgtttaacgcggacatccagcgctaatttcggataaacgctactcacgcgatttaacaggaaaggtaagatcgtatcggcagattcatcactagcaccgatagttaatacgccctgaagattactgaacattaaactactgcaggcctcatcattaaaacgcaggattttcctggcgtaaccaagaagttgaatgccatgttcagttaacagtttgttgcgaccgtgacgagcgaacagttctttcccaacgagttgttccagacgctgcatttgctgacttacggcggactgagtacgacacacagcggcagctgcggcagcaaaagtgttcagatcggcaacagcaacaaatgttctcagcagatcgaggtcgaggttaattatcggacgatttgcacttatcatatattatcacttactggcggctcatactgagctggttaatgctgtgcacacacaaacaagcaattccatttgtaatgtgcctccctggcagtttcatccggaacccggacgaaagtaaaaatgcatatgagttgcactaaaaaagcgactcacattgttccgttataatgcctgaagtagatcacagaatatatcttcagggatcgcatatctattaagttactcactcttttctatttatgacatgcgcgtgtttgtataaatgtaaatgtgagtccttgttccactctcgtgcagcatcgctggtcatacgcgaacacgtaccaacagcaatggtgaggcggcatcaagagcagggatccgtcatttatccgagcattttaccccaaaaaccttttatttataagggtcattgcgaattatctgatgcaaagttatgttatgttaggcaaagtaatcttctattattaataagcacatcaaaacctttttgaatattaaataataattaattagcatcatcctcattcattaattccgcttaacaatagtttcacaccttgcccccattgcgacacctcggaaatcatcacgcagttaaactctccgtaatgaggaaatatcatcatcgcgtttcattagtgaattcttaaatgaggcattttcacacaattatcttacagataaaaaaaccagacttacaattaagaatcagaacaattcactatataacattgcatgtaaagcatatacacctcattattttgtcattattaagttattaacagcacaatcgagccttcccctctggcaaaatcttattctgcagaccttcaaaacaccgtcctgggggagtacattgttctaagctgacttccacggcagggagtggcgataacagcaaaaaaggtcaagattcatgtcccccattgaaaaatccagcaaattagagaatgtctgttatgacatccgtggtccggtgctgaaagaagcaaaacgcctggaagaagaaggtaacaaggtactgaaactgaacatcggcaacccagccccgttcggttttgacgcgccagatgaaatcctcgttgacgtgatacgcaacctgcctaccgctcaagggtattgcgattccaaaggtctttactccgcgcgtaaagccatcatgcagcactaccaggctcgtggcatgcgtgatgttaccgtggaagatatttacatcggcaatggtgtaagcgagcttatcgttcaggcaatgcaggcattgctgaacagcggggacgaaatgttggttcctgcaccagattacccactctggaccgcggcggttagcctttccagcggtaaagcggtgcattatctttgcgatgaatcctctgactggttcccggacctcgatgatattcgcgctaaaattacgcctcgtacgcgtgggatcgttattatcaacccaaataacccaaccggcgcggtatattccaaagagcttttaatggagattgtggagattgcacgtcagcataatctcattatcttcgccgatgaaatttatgacaaaattctctacgacgacgctgagcatcacagtattgcgccgctggcacctgacctgctgaccattacctttaacggactgagcaaaacgtaccgcgttgcaggcttccgtcaggggtggatggtgttgaacgggccgaaaaaacacgccaaaggctacatcgaaggtctggaaatgctggctagtatgcgcctgtgtgctaacgttcctgcgcaacacgccattcagaccgcgctaggtggttatcagagcatcagtgaatttattacccctggcggtcgtctttatgagcagcgtaaccgcgcgtgggaactgatcaacgatattccgggcgtttcctgcgtgaaacctcgtggtgcgctgtatatgttcccgaaaatcgacgccaaacgctttaacattcacgacgatcagaaaatggtgttggatttcctgttgcaggaaaaagttctgttggtgcaagggacggcattcaactggccgtggccggatcacttccgcattgtcacgctaccgcgtgtcgatgatatcgagctgtctttgagcaagttcgcgcgtttcctttctggttatcatcagctgtaatcttaatttcactgccggagattgcatccggcagcgttatcccgccacaatgacctgatgatgtcatcatacgtaaggtcactatgaaacagagccatttttttgcccatctctcccgcctgaaactcattaaccgctggccgctcatgcgcaacgtgcggacggaaaatgtgtccgaacacagtttgcaggtagcgatggtcgcccatgcgctggcagctatcaaaaatcgaaaatttggcggtaatgtcaacgccgaacgtatcgctttactggcgatgtaccacgatgccagtgaagtgctcaccggcgatctccctactccggtgaaatacttcaatagccaaatcgctcaggagtacaaggctattgaaaaaatcgctcagcaaaaactggtcgatatggttccggaagagctgcgggatatctttgcgccgttaattgacgagcatgcatatagcgatgaagaaaaaagcctggtgaaacaggcagatgcactgtgtgcatatctgaaatgtctggaagaactcgcggccggaaataatgaattcttgctggcaaaaacgcgactggaagcgacgcttgaagcgcgtcgcagccaggagatggactacttcatggaaatatttgttcccagcttccatcttagcctcgatgagattagccaggatagtccgctgtaagcagccggagtctgcgtcgcatcaggcaataagcgccggatgcgacatcaggctcttgtcaaaacggaaacagcatcgggatcatcaccacacaaaccgccatcacgataatggtgaacggtacccccaacttcacaaagtcactgaagctgtaatttcccggacctaaaaccagtgtgttaacaggactagaaaccggtgtcataaaggcggcggatgctgccatcgccacgaccatcgcgaatggataagggctcacccccatcgttttggcagcagccagcgcaatcggagccatcaacaccgccgtcgcggtattagagataaatagcccaataaccgcgctcaagacaaacaaacaccccagcatcatatgtggcccgtaaccaccgccaatgtccatcagccctttcaccgccagcgcgacacctcccgttttctgtaatgccacagcaaacggcatcatcccaacgatcaaaataatgctcggccagtgaatggatttataggcgctttcagcatctatacagcggaatttccccatcagcaggcaggcgatgatagcggcaacaggattaggaatttcatctgtcagcattaacgccaccattagcaccagacagaaaatggcatggggtgcctggctgtgcgcgggacttgcttcactcacctcttccggtaagttcagcgctacgaagtcgcggccctgtttggccagcataccgatcagtttccagttacccacaaccaggatgatatcgcccagcagcagaggctcatccgccaggctaccttccagcgccacgccattgcgctttagccccaccacattcagtccgtagcgggtacgaaaaccaatttcgcgcacgcttttaccaatcagttcactctcaggaattaaactaatctctgccatgcccacatcaagggcctggtcagaaaaatactcgccgcgcagtaccatcggctccagcaattgctcactacaaaattgccggagatcgacatcagccgcagacatatcaataagcaaaacgtcacgcgcgcgaaattcagaaaccccattaacgttcacgataacgcgacgaaaacgccgccagcgttcaacaccgatgacgttagcgccataacgctcacgtaatttgagatcatccagccgttgaccaatcattgggcttccggggcgaatagccagacgtcgcgcacgcccggtcagtcgatattcacggataagatcgcgaaaggttcgacgcgtccagccttcgcgctgcggggtctgggtatcccctttcagcatgaaacgcatcactaacatatacaaaatacccagcaccagcacgaccaggccaataggtgttacgctaaagaaactgaagccgtgatagccttcacgcagcaattcactgttgactaccaggttcggcggcgtcgccaccagcgtcatcatgccgctaatcagcccggcaaaacttaacggcatcatcagacgactcgggctcgtttgcatacgcatggcaacgcttaacaccacgggaataaagatagcgacaacgccggtactactcataaacgcgccaagccccgcgacggtcagcatcaacaaaaccaacattttgatttcactattgcccgcaactttgaccagccatgttcccattacggtggcaacaccggtacggaccaaaccatcgccaataataaacaaggcggcaatcaggacaacgttaggatcagaaaagccggaaaatacttctgggactgtcagcgttccgcttaatgcaaacgcgacaataacaaacaaagcgaccgcatccatacgcactctgcccgtcgcaaacaagacgatggcaacggccagtaaactaagaacccaaatcaattcaccgttcacaacttatccttgttaattgagggggatgacttgattctgccataaaaaagccccgacgagacggggctaaatcatgatcaggtgtttcactgaataataacatcgccatttggctgtttggtcacagtaatttgctccagactgtggaggaccaaatcgacctcattcaggcgcggggtatctgccggagcgttaaccgcaatgacatgacaacccgccgccaggccagaaagcacgccagcgggagcatcttccaccaccacacactcctgcggcgcaagccccagcagctgcgcgcctaacagatacgcatcaggttctggttttccgcgcttcactcgctcagcggttacaaacacctctggtgcgggaagcccagctattttatggcgcgctcgcgctaccggcatggagccagaagtcacaatggcccacggaatacctgctttattcaaatgactgagtaaggcgattgcccccggaagcgcggtaataccttcggtttccgtggcctcgatgtgctccagacgcgtaaactcggcggcaatatcagcctcggatttgcccgccataaaatggcgcagagaggtgatcgcctgtttaccgtgaatgaaagccagcacctcttccggcgctaacccatgacgtctggcccagttgctccacgcccgttctaccgcaggcagggaatccaccagcgttccatcaagatcaaacagaaaacctttgcaccgcacgcgggcctcctcaggcattgataatttgattaatttcgttggcgctcaaatggtactgacgcgggcaggcatgccacacattaagcatgcgctgatatttttcccacattggcgtctgggcgttaaaaccgtgagttccggcgtcaaaatgggtatagcgcccttccacattaaccataaagcggacataaccgaggtaacgtgcttcagtggcggcgtcaaagccgaggaaggtgacacgacgttcatcgatggattgctggtcctgcaaattagaccaggaaacatgcaacgcatgatacatctccataatgtcgatgatagtgcggcaggtttcttctttcagctcgccaaactcgcgatccaattcacgcatctgtaatccgtaaccacgctcaataattgtttgcaggcgacggtaacgttcagcatttgccggatcgagcatagtcatcatcttgtactgattagacaaaataagacgttgcgcgttggtcatttccattgttgactcctgtatcactctactacggtgaaaaaaaagaaggctgagtatgccttcttttatatgcgtaatcaggggtcaattacaaatcatcaaggaaagttttatccagttgtttgaaggcgcgcttaagcgtgtcagctaatgcctggtaatcaggcttgccttcaacgggtgccaacacctgtccagactcctgcaatttaccgcgaacttcataaaaccagttaaggattgcagggggtaatggcgtgacagaacgcttgcccagccaccacaatccctgcatgggtaaacttaaggcgaacagggcagtggcaactgccggcccaagctgaccgcccagggcaatctgccagcagagagtaaatacggcgatcggcggcataaaacggatcgcataacgcgtcatcttgataacgcgattttcgacaaagaccggggcaaggcgtttttccagcggccacgtcttactgtaatgctgtccccggcgaaacaagctaaaaaaattaacagaacgattatccggcgtactcatgcttcacctcaacttcacatataaagattcaaaaatttgtgcaaattcacaactcagcgggacaacgttcaaaacattttgtcttccatacccactatcaggtatcctttagcagcctgaaggcctaagtagtacatattcattgagtcgtcaaattcatatacattatgccattggctgaaaattacgcaaaatggcatagactcaagatatttcttccatcatgcaaaaaaaatttgcagtgcatgatgttaatcataaatgtcggtgtcatcatgcgctacgctctatggctccctgacgtttttttagccacgtatcaattataggtacttccatgagcagtaagttagtactggttctgaactgcggtagttctagtctgaaatttgccatcatcgatgcagtaaatggtgaagagtacctttctggtttagccgaatgtttccacctgcccgaagcacgtatcaaatggaaaatggacggcaataaacaggaagcggctttaggtgcaggcgccgctcacagcgaagcgctcaactttatcgttaatactattctggcacaaaaaccagaactgtctgcgcagctgactgctatcggtcaccgtatcgtacacggcggcgaaaagtataccagctccgtagtgatcgatgagtctgttattcagggtatcaaagatgcagcttcttttgcaccgctgcacaacccggctcacctgatcggtatcgaagaagctctgaaatctttcccacagctgaaagacaaaaacgttgctgtatttgacaccgcgttccaccagactatgccggaagagtcttacctctacgccctgccttacaacctgtacaaagagcacggcatccgtcgttacggcgcgcacggcaccagccacttctatgtaacccaggaagcggcaaaaatgctgaacaaaccggtagaagaactgaacatcatcacctgccacctgggcaacggtggttccgtttctgctatccgcaacggtaaatgcgttgacacctctatgggcctgaccccgctggaaggtctggtcatgggtacccgttctggtgatatcgatccggcgatcatcttccacctgcacgacaccctgggcatgagcgttgacgcaatcaacaaactgctgaccaaagagtctggcctgctgggtctgaccgaagtgaccagcgactgccgctatgttgaagacaactacgcgacgaaagaagacgcgaagcgcgcaatggacgtttactgccaccgcctggcgaaatacatcggtgcctacactgcgctgatggatggtcgtctggacgctgttgtattcactggtggtatcggtgaaaatgccgcaatggttcgtgaactgtctctgggcaaactgggcgtgctgggctttgaagttgatcatgaacgcaacctggctgcacgtttcggcaaatctggtttcatcaacaaagaaggtacccgtcctgcggtggttatcccaaccaacgaagaactggttatcgcgcaagacgcgagccgcctgactgcctgatttcacaccgccagctcagctggcggtgctgttttgtaacccgccaaatcggcggtaacgaaagaggataaaccgtgtcccgtattattatgctgatccctaccggaaccagcgtcggtctgaccagcgtcagccttggcgtgatccgtgcaatggaacgcaaaggcgttcgtctgagcgttttcaaacctatcgctcagccgcgtaccggtggcgatgcgcccgatcagactacgactatcgtgcgtgcgaactcttccaccacgacggccgctgaaccgctgaaaatgagctacgttgaaggtctgctttccagcaatcagaaagatgtgctgatggaagagatcgtcgcaaactaccacgctaacaccaaagacgctgaagtcgttctggttgaaggtctggtcccgacacgtaagcaccagtttgcccagtctctgaactacgaaatcgctaaaacgctgaatgcggaaatcgtcttcgttatgtctcagggcactgacaccccggaacagctgaaagagcgtatcgaactgacccgcaacagcttcggcggtgccaaaaacaccaacatcaccggcgttatcgttaacaaactgaacgcaccggttgatgaacagggtcgtactcgcccggatctgtccgagattttcgacgactcttccaaagctaaagtaaacaatgttgatccggcgaagctgcaagaatccagcccgctgccggttctcggcgctgtgccgtggagctttgacctgatcgcgactcgtgcgatcgatatggctcgccacctgaatgcgaccatcatcaacgaaggcgacatcaatactcgccgcgttaaatccgtcactttctgcgcacgcagcattccgcacatgctggagcacttccgtgccggttctctgctggtgacttccgcagaccgtcctgacgtgctggtggccgcttgcctggcagccatgaacggcgtagaaatcggtgccctgctgctgactggcggttacgaaatggacgcgcgcatttctaaactgtgcgaacgtgctttcgctaccggcctgccggtatttatggtgaacaccaacacctggcagacctctctgagcctgcagagcttcaacctggaagttccggttgacgatcacgaacgtatcgagaaagttcaggaatacgttgctaactacatcaacgctgactggatcgaatctctgactgccacttctgagcgcagccgtcgtctgtctccgcctgcgttccgttatcagctgactgaacttgcgcgcaaagcgggcaaacgtatcgtactgccggaaggtgacgaaccgcgtaccgttaaagcagccgctatctgtgctgaacgtggtatcgcaacttgcgtactgctgggtaatccggcagagatcaaccgtgttgcagcgtctcagggtgtagaactgggtgcagggattgaaatcgttgatccagaagtggttcgcgaaagctatgttggtcgtctggtcgaactgcgtaagaacaaaggcatgaccgaaaccgttgcccgcgaacagctggaagacaacgtggtgctcggtacgctgatgctggaacaggatgaagttgatggtctggtttccggtgctgttcacactaccgcaaacaccatccgtccgccgctgcagctgatcaaaactgcaccgggcagctccctggtatcttccgtgttcttcatgctgctgccggaacaggtttacgtttacggtgactgtgcgatcaacccggatccgaccgctgaacagctggcag
